(19) United States
(12) Patent Application Publication
(10) Pub. No.: US 2019/0071474 A1
(43) Pub. Date: Mar. 7, 2019

(54) PRODUCTION OF GIBBERELLINS IN RECOMBINANT HOSTS

(71) Applicant: Evolva SA, Reinach (CH)

(72) Inventors: Esben Halkjaer Hansen, Frederiksberg (DK); Nina Nicoline Rasmussen, Hvidovre (DK); Michael Naesby, Basel (CH); Jane Dannow Dyekjaer, Copenhagen (DK); Simon Carlsen, Copenhagen (DK); Adam Matthew Takos, Valby (DK); Nicholas Ohler, Reinach (CH)

(21) Appl. No.: 16/080,741

(22) PCT Filed: Mar. 3, 2017
(86) PCT No.: PCT/EP2017/055083

§ 371 Date: Aug. 29, 2018

Related U.S. Application Data
(60) Provisional application No. 62/303,973, filed on Mar. 4, 2016.

(51) Int. Cl. C07K 14/415; C12N 9/02; C12P 27/00

(52) U.S. Cl. CPC C07K 14/415; C12N 9/0071; C12Y 114/13079; C12Y 114/14001; C12P 27/00

(57) ABSTRACT

The invention relates to recombinant microorganisms and methods for producing gibberellin compounds and gibberellin precursors.

### CROSS REFERENCE

[0001] This application is related to U.S. provisional patent application, Ser. No. 62/303,973, filed Mar. 4, 2016, the disclosure of which is incorporated by reference herein in its entirety.

### SEQUENCE LISTING

[0002] The sequence listing submitted herewith, entitled “15-1649-WO_SequenceListing_ST25.txt” and 713 kb in size, is incorporated by reference in its entirety.

### BACKGROUND OF THE INVENTION

### Field of the Invention

[0003] This disclosure relates to recombinant production of gibberellin compounds and gibberellin precursors in recombinant hosts. In particular, this disclosure relates to production of gibberellin A3 (i.e., GA₃) in recombinant hosts.

### Description of Related Art

[0004] Gibberellins are diterpene plant hormones that are biosynthesized through complex pathways and control diverse aspects of growth and development during a plant's life cycle, including, but not limited to, seed germination, stem elongation, sex expression, flowering, formation of fruits, and senescence. Gibberellin structure is shown in FIG. 1. Higher plants as well as some fungi and bacteria produce gibberellins, of which more than 130 are known. Only a small subset of these gibberellins, including gibberellin A1 (i.e., GA₁), GA₃, GA₄, and GA₇ are thought to exert an effect on plant growth and/or metabolism; the remainder are believed to be precursors for these gibberellins, or deactivated metabolites. GA₁, GA₃, GA₄, and GA₇ commonly have a hydroxyl group on C-3, a carboxylic acid group on C-6, and a lactone between C-4 and C-10. See, Yamaguchi, 2008, Annu. Rev. Plant Biol. 59:225-51; Bömke and Tudzynski, 2009, Phytochemistry 70:1876-93.

[0005] In plants, fungi, and bacteria, gibberellins are synthesized from kaurenoic acid in a stepwise fashion, wherein a series of functional group additions and oxidations are performed by cytochrome P450 monooxygenases (P450s) and 2-oxoglutarate-dependent dioxygenases (2-ODDs). See, FIG. 2. Although structurally identical gibberellins are synthesized biologically across plants, fungi, and bacteria, there are differences in the biosynthetic pathways and in the specific enzymes involved. For example, in plants, GA₄ can be synthesized from kaurenoic acid via a pathway that includes GA₁₂, GA₁₅, GA₂₄, and GA₉, while in fungi, GA₄ is synthesized from kaurenoic acid via a pathway that includes GA₁₄. In another example, conversion of GA₁₂ to GA₁₅ in plants is catalyzed by a P450 enzyme, while in bacteria conversion of GA₁₂ to GA₁₅ is catalyzed by a 2-ODD enzyme.

[0006] In plants, the P450 enzyme involved is kaurenoic acid oxidase (KAO) and the 2-ODD enzymes are GA oxidases (e.g., GA₂₀ₒₓ, GA₇ₒₓ, etc.). In fungi, the P450 enzymes P450-1, P450-2, and P450-3 are responsible for the majority of the gibberellin synthesis pathway, while GA₄ desaturase (DES) is the only 2-ODD enzyme involved. See, Yamaguchi, Annu. Rev. Plant Biol. 59:225-51 (2008); Bömke and Tudzynski, Phytochemistry 70:1876-93 (2009). In bacteria, P450 enzymes perform the majority of gibberellin biosynthesis. See, Bottini et al., 2004, Appl. Microbiol. Biotechnol. 65:497-503.

[0007] GA₃ (gibberellic acid), is used commercially for a variety of purposes, including inducing seed germination, inducing flowering, and increasing fruit size. Because plants produce only minute amounts of GA₃, the hormone is produced industrially by submerged fermentation using the fungus Gibberella fujikuroi (also known as Fusarium fujikuroi.) F. fujikuroi is not a preferred production host due to slow growth compared to other production hosts; an F. fujikuroi fermentation typically can last up 9 days, while a Saccharomyces cerevisiae fermentation usually is completed in 4-5 days. See Uthandi et al., 2009, Journal of Scientific & Industrial Research 69:211-4 and Rodrigues et al., 2009, Braz. Arch. Biol. Tech. 52(Special No.):181-8. As production, recovery, and purification of GA₃ and other gibberellins have proven to be costly, there remains a need for a recombinant production system that can accumulate high yields of desired gibberellins, such as GA₃, GA₄, GA₇, or GA₁, in a more cost-effective manner.

### SUMMARY OF THE INVENTION

[0008] It is against the above background that the present invention provides certain advantages and advancements over the prior art.

[0009] Although this invention as disclosed herein is not limited to specific advantages or functionalities, the invention provides a recombinant host cell, comprising:
[0010] (a) a recombinant gene encoding a first cytochrome P450 (P450) polypeptide; and/or
[0011] (b) a recombinant gene encoding a 2-oxoglutarate-dependent dioxygenase (2-ODD) polypeptide and/or a second cytochrome P450 (P450) polypeptide;

[0012] wherein the recombinant host cell is capable of producing a gibberellin precursor and/or a gibberellin compound.

[0013] In one aspect of the recombinant host cell disclosed herein, the gene encoding the first P450 polypeptide encodes a kaurenoic acid oxidase (KAO) polypeptide or a cytochrome P450 monooxygenase-1 (P450-1) polypeptide.

[0014] In one aspect of the recombinant host cell disclosed herein, the gene encoding the first P450 polypeptide comprises:
[0015] (a) a gene encoding a kaurenoic acid oxidase (KAO1) polypeptide;
[0016] (b) a gene encoding a kaurenoic acid oxidase (KAO2) polypeptide;
[0017] (c) a gene encoding a kaurenoic acid oxidase (KAO3) polypeptide;
[0018] (d) a gene encoding a kaurenoic acid oxidase (KAO4) polypeptide;
[0019] (e) a gene encoding a kaurenoic acid oxidase (KAO5) polypeptide;
[0020] (f) a gene encoding a kaurenoic acid oxidase (KAO6) polypeptide;
[0021] (g) a gene encoding a kaurenoic acid oxidase (KAO9) polypeptide;
[0022] (h) a gene encoding a kaurenoic acid oxidase (KAO10) polypeptide;
[0023] (i) a gene encoding a kaurenoic acid oxidase (KAO11) polypeptide;
[0024] (j) a gene encoding a cytochrome P450 monooxygenase-2 (P450-2) polypeptide;
[0025] (k) a gene encoding a cytochrome P450 monooxygenase-3 (P450-3) polypeptide;
[0026] (l) a gene encoding a cytochrome P-450 BJ-1 (CYP112) polypeptide; and/or
[0027] (m) a gene encoding a gibberellin A13-oxidase (GA₁₃ₒₓ) polypeptide.

[0028] In one aspect of the recombinant host cell disclosed herein,
[0029] (a) the KAO1 polypeptide comprises a KAO1 polypeptide having at least 50% sequence identity to the amino acid sequence set forth in SEQ ID NO:90;
[0030] (b) the KAO2 polypeptide comprises a KAO2 polypeptide having at least 50% sequence identity to the amino acid sequence set forth in SEQ ID NO:88;
[0031] (c) the KAO3 polypeptide comprises a KAO3 polypeptide having at least 50% sequence identity to the amino acid sequence set forth in SEQ ID NO:146;
[0032] (d) the KAO4 polypeptide comprises a KAO4 polypeptide having at least 50% sequence identity to the amino acid sequence set forth in SEQ ID NO:74;
[0033] (e) the KAO5 polypeptide comprises a KAO5 polypeptide having at least 60% sequence identity to the amino acid sequence set forth in SEQ ID NO:62;
[0034] (f) the KAO6 polypeptide comprises a KAO6 polypeptide having at least 60% sequence identity to the amino acid sequence set forth in SEQ ID NO:60;
[0035] (g) the KAO9 polypeptide comprises a KAO9 polypeptide having at least 70% sequence identity to the amino acid sequence set forth in SEQ ID NO:68;
[0036] (h) the KAO10 polypeptide comprises a KAO10 polypeptide having at least 70% sequence identity to the amino acid sequence set forth in SEQ ID NO:58;
[0037] (i) the KAO11 polypeptide comprises a KAO11 polypeptide having at least 65% sequence identity to the amino acid sequence set forth in SEQ ID NO:64;
[0038] (j) the P450-2 polypeptide comprises a P450-2 polypeptide having at least 50% sequence identity to the amino acid sequence set forth in SEQ ID NO:80;
[0039] (k) the P450-3 polypeptide comprises a P450-3 polypeptide having at least 50% sequence identity to the amino acid sequence set forth in SEQ ID NO:186;
[0040] (l) the CYP112 polypeptide comprises a CYP112 polypeptide having at least 70% sequence identity to the amino acid sequence set forth in SEQ ID NOs: 4, 6, 8, 10, 124, or 128; or
[0041] (m) the GA₁₃ₒₓ polypeptide comprises a GA₁₃ₒₓ polypeptide having at least 70% sequence identity to the amino acid sequence set forth in SEQ ID NO:98.

[0042] In one aspect of the recombinant host cell disclosed herein, the gene encoding the second P450 polypeptide comprises:
[0043] (a) a P450-2 polypeptide having at least 50% sequence identity to the amino acid sequence set forth in SEQ ID NO:80;
[0044] (b) a P450-2 polypeptide having at least 50% sequence identity to the amino acid sequence set forth in SEQ ID NO:233;
[0045] (c) a P450-2 polypeptide having at least 50% sequence identity to the amino acid sequence set forth in SEQ ID NO 235;
[0046] (d) a P450-2 polypeptide having at least 50% sequence identity to the amino acid sequence set forth in SEQ ID NO:237;
[0047] (e) a P450-2 polypeptide having at least 50% sequence identity to the amino acid sequence set forth in SEQ ID NO:18; or
[0048] (f) a CYP112 polypeptide having at least 70% sequence identity to the amino acid sequence set forth in SEQ ID NO:124.

[0049] In one aspect of the recombinant host cell disclosed herein, the gene encoding the 2-ODD polypeptide comprises:
[0050] (a) a gene encoding a desaturase (DES) polypeptide;
[0051] (b) a gene encoding a gibberellin A7-oxidase (GA₇ₒₓ) polypeptide;
[0052] (c) a gene encoding a gibberellin A3-oxidase (GA₃ₒₓ) polypeptide; or
[0053] (d) a gene encoding a gibberellin A20-oxidase (GA₂₀ₒₓ) polypeptide.

[0054] In one aspect of the recombinant host cell disclosed herein,
[0055] (a) the DES polypeptide comprises a DES polypeptide having at least 50% sequence identity to the amino acid sequence set forth in SEQ ID NO:26;
[0056] (b) the GA₇ₒₓ polypeptide comprises a GA₇ₒₓ polypeptide having 60% or greater sequence identity to the amino acid sequence set forth in SEQ ID NO:152;
[0057] (c) the GA₃ₒₓ polypeptide comprises a GA₃ₒₓ polypeptide having at least 50% sequence identity to the amino acid sequence set forth in SEQ ID NO:28, SEQ ID NO:30, SEQ ID NO:36, or SEQ ID NO:44; or
[0058] (d) the GA₂₀ₒₓ polypeptide comprises a GA₂₀ₒₓ polypeptide having at least 70% sequence identity to the amino acid sequence set forth in SEQ ID NO:40 or SEQ ID NO:42.

[0059] The invention further provides a recombinant host cell comprising:
[0060] (a) a gene encoding a kaurenoic acid oxidase (KAO4) polypeptide having at least 50% sequence identity to the amino acid sequence set forth in SEQ ID NO:74;
[0061] (b) a gene encoding a desaturase (DES) polypeptide having at least 50% sequence identity to the amino acid sequence set forth in SEQ ID NO:26;
[0062] (c) a gene encoding a cytochrome P450 monooxygenase-2 (P450-2) polypeptide having at least 50% sequence identity to the amino acid sequence set forth in SEQ ID NO:80; and
[0063] (d) a gene encoding a cytochrome P450 monooxygenase-3 (P450-3) polypeptide having at least 50% sequence identity to the amino acid sequence set forth in SEQ ID NO:186;

[0064] wherein the recombinant host cell is capable of producing a gibberellin precursor and/or a gibberellin compound.

[0065] The invention further provides a recombinant host cell, comprising:
[0066] (a) a gene encoding a kaurenoic acid oxidase (KAO4) polypeptide having at least 50% sequence identity to the amino acid sequence set forth in SEQ ID NO:74;
[0067] (b) a gene encoding a gibberellin A20-oxidase (GA₂₀ₒₓ) polypeptide having at least 50% sequence identity to the amino acid sequence set forth in SEQ ID NO:42;
[0068] (c) a gene encoding a cytochrome P450 monooxygenase-3 (P450-3) polypeptide having at least 50% sequence identity to the amino acid sequence set forth in SEQ ID NO: 186; and
[0069] (d) a gene encoding a desaturase (DES) polypeptide having at least 50% sequence identity to the amino acid sequence set forth in SEQ ID NO:26;

[0070] wherein the recombinant host cell is capable of producing a gibberellin precursor and/or a gibberellin compound.

[0071] The invention further provides a recombinant host cell comprising a gene encoding a kaurenoic acid oxidase (KAO) polypeptide having at least 60% sequence identity to the amino acid sequence set forth in SEQ ID NO:62, SEQ ID NO:60, or SEQ ID NO:152, at least 70% sequence identity to the amino acid sequence set forth in SEQ ID NO:58 or SEQ ID NO:68, at least 65% sequence identity to the amino acid sequence set forth in SEQ ID NO:64, or at least 50% sequence identity to the amino acid sequence set forth in SEQ ID NO:74;

[0072] wherein the recombinant host cell is capable of producing gibberellin precursor and/or a gibberellin compound.

[0073] In one aspect of the recombinant host cell disclosed herein, the recombinant host cell further comprises:
[0074] (a) a gene encoding a gibberellin A20-oxidase (GA₂₀ₒₓ) polypeptide having at least 70% sequence identity to the amino acid sequence set forth in SEQ ID NO:40; and
[0075] (b) a gene encoding a gibberellin A13-oxidase (GA₁₃ₒₓ) polypeptide having at least 70% sequence identity to the amino acid sequence set forth in SEQ ID NO:98.

[0076] The invention further provides a recombinant cell host, comprising:
[0077] (a) a gene encoding a kaurenoic acid oxidase (KAO11) polypeptide having at least 65% sequence identity to the amino acid sequence set forth in SEQ ID NO:64; and
[0078] (b) a gene encoding a cytochrome P-450 BJ-1 (CYP112) polypeptide having at least 70% sequence identity to the amino acid sequence set forth in SEQ ID NO:124;

[0079] wherein the recombinant host cell is capable of producing a gibberellin precursor and/or a gibberellin compound.

[0080] The invention further provides a recombinant host cell, comprising:
[0081] (a) a gene encoding a kaurenoic acid oxidase (KAO4) polypeptide having at least 50% sequence identity to the amino acid sequence set forth in SEQ ID NO:74; and
[0082] (b) a gene encoding a cytochrome P-450 BJ-1 (CYP112) polypeptide having at least 70% sequence identity to the amino acid sequence set forth in SEQ ID NO:124;

[0083] wherein the recombinant host cell is capable of producing a gibberellin precursor and/or a gibberellin compound.

[0084] In one aspect of the recombinant host cell disclosed herein, the recombinant host cell further comprises:
[0085] (a) a gene encoding a polypeptide capable of synthesizing geranylgeranyl pyrophosphate (GGPP) from farnesyl diphosphate (FPP) and isopentenyl diphosphate (IPP);
[0086] (b) a gene encoding a polypeptide capable of synthesizing ent-copalyl diphosphate from GGPP;
[0087] (c) a gene encoding a polypeptide capable of synthesizing ent-kaurene from ent-copalyl pyrophosphate;
[0088] (d) a gene encoding a bifunctional polypeptide capable of synthesizing ent-copalyl diphosphate from GGPP and synthesizing ent-kaurene from ent-copalyl pyrophosphate;
[0089] (e) a gene encoding a polypeptide capable of synthesizing ent-kaurenoic acid from ent-kaurene;
[0090] (f) a gene encoding a cytochrome B5 polypeptide;
[0091] (g) a gene encoding a polypeptide capable of reducing cytochrome B5 polypeptide;
[0092] (h) a gene encoding a polypeptide capable of reducing cytochrome P450 complex;
[0093] (i) a gene encoding a ferredoxin polypeptide;
[0094] (j) a gene encoding a ferredoxin reductase polypeptide; and/or
[0095] (k) an alcohol dehydrogenase (ADH) polypeptide capable of reducing a gibberellin intermediate.

[0096] In one aspect of the recombinant host cell disclosed herein,
[0097] (a) the polypeptide capable of synthesizing geranylgeranyl pyrophosphate (GGPP) from farnesyl diphosphate (FPP) and isopentenyl diphosphate (IPP) comprises a polypeptide having at least 70% sequence identity to the amino acid sequence set forth in SEQ ID NO:50, SEQ ID NO:134, or SEQ ID NO:178;
[0098] (b) the polypeptide capable of synthesizing ent-copalyl diphosphate from GGPP comprises a polypeptide having at least 70% sequence identity to the amino acid sequence set forth in SEQ ID NO:38, SEQ ID NO:102, SEQ ID NO:104, SEQ ID NO:106, SEQ ID NO:108, or SEQ ID NO:180;
[0099] (c) the polypeptide capable of synthesizing ent-kaurene from ent-copalyl pyrophosphate comprises a polypeptide having at least 70% sequence identity to the amino acid sequence set forth in SEQ ID NO:102 or SEQ ID NO:106;
[0100] (d) the bifunctional polypeptide capable of synthesizing ent-copalyl diphosphate from GGPP and synthesizing ent-kaurene from ent-copalyl pyrophosphate comprises a CDPS-KS polypeptide having at least 70% sequence identity to the amino acid sequence set forth in SEQ ID NO:104;
[0101] (e) the polypeptide capable of synthesizing ent-kaurenoic acid from ent-kaurene comprises a polypeptide having at least 70% sequence identity to the amino acid sequence set forth in SEQ ID NO:82, SEQ ID NO:164, SEQ ID NO:170, or SEQ ID NO:172;
[0102] (f) the cytochrome B5 polypeptide comprises a cytochrome B5 polypeptide having at least 60% sequence identity to the amino acid sequence set forth in SEQ ID NO:160 or SEQ ID NO:239;
[0103] (g) the cytochrome B5 reductase polypeptide comprises a cytochrome B5 reductase polypeptide having at least 80% sequence identity to the amino acid sequence set forth in SEQ ID NO:2 or SEQ ID NO:241;
[0104] (h) the polypeptide capable of reducing cytochrome P450 complex comprises a CPR reductase polypeptide having at least 50% sequence identity to the amino acid sequence set forth in SEQ ID NO:48, SEQ ID NO:100, SEQ ID NO:140, SEQ ID NO:158, SEQ ID NO:168, SEQ ID NO:192 or SEQ ID NO:194;
[0105] (i) the ferredoxin polypeptide comprises a ferredoxin polypeptide having at least 80% sequence identity to the amino acid sequence set forth in SEQ ID NO:148;
[0106] (j) the ferredoxin reductase polypeptide comprises a ferredoxin reductase polypeptide having at least 70% sequence identity to the amino acid sequence set forth in SEQ ID NO:150; and/or
[0107] (k) the ADH polypeptide comprises an ADH polypeptide having at least 70% sequence identity to the amino acid sequence set forth in SEQ ID NO:116.

[0108] In one aspect of the recombinant host cell disclosed herein, the recombinant host cell further comprises:
[0109] (a) a gene encoding an open reading frame (ORF) polypeptide;
[0110] (b) a gene encoding an aldehyde dehydrogenase (ALDH) polypeptide;
[0111] (c) a gene encoding a myo-inositol transport protein ITR1 (smt) polypeptide;
[0112] (d) a gene encoding an endoplasmic reticulum (ER) membrane polypeptide; and/or
[0113] (e) a gene encoding a damage resistance protein 1 (DAP) polypeptide.

[0114] In one aspect of the recombinant host cell disclosed herein,
[0115] (a) the ORF polypeptide comprises an ORF polypeptide having at least 50% sequence identity to the amino acid sequence set forth in SEQ ID NO:154 or SEQ ID NO:156;
[0116] (b) the AIdDH polypeptide comprises an AIdDH polypeptide having at least 60% sequence identity to the amino acid sequence set forth in SEQ ID NO:202;
[0117] (c) the smt polypeptide comprises an smt polypeptide having at least 90% sequence identity to the amino acid sequence set forth in SEQ ID NO:209;
[0118] (d) the ER membrane polypeptide comprises an inheritance of cortical ER protein 2 (ICE2) polypeptide having at least 60% sequence identity to the amino acid sequence set forth in SEQ ID NO:206; and/or
[0119] (e) the DAP polypeptide comprises a DAP polypeptide having at least 70% sequence identity to the amino acid sequence set forth in SEQ ID NO:213, SEQ ID NO:215, SEQ ID NO:217, or SEQ ID NO:224.

[0120] In one aspect of the recombinant host cell disclosed herein, expression of the recited genes increases the portion of the gibberellin precursor and/or the gibberellin compound produced by the recombinant host cell by at least about 10%, 25%, 50%, 75%, 80%, 90%, 95%, 100% or more.

[0121] In one aspect of the recombinant host cells disclosed herein, the gibberellin compound comprises GA₁, GA₃, GA₄, GA₅, GA₇, GA₉, GA₁₂, GA₁₃, GA₁₄, GA₁₅, GA₁₉, GA₂₀, GA₂₄, GA₂₅, GA₃₆, GA₃₇, GA₄₄, GA₅₃, and/or GA₁₁₀.

[0122] In one aspect of the recombinant host cells disclosed herein, the recombinant host comprises a plant cell, a mammalian cell, an insect cell, a fungal cell, an algal cell or a bacterial cell.

[0123] The invention further provides a method of producing a gibberellin precursor and/or a gibberellin compound in a cell culture, comprising growing the recombinant host cell disclosed herein in a cell culture, under conditions in which the genes are expressed;

[0124] wherein the gibberellin precursor and/or the gibberellin compound is produced by the recombinant host cell.

[0125] In one aspect, the method disclosed herein further comprises isolating the gibberellin precursor and/or the gibberellin compound from the cell culture.

[0126] In one aspect of the method of producing a gibberellin precursor and/or gibberellin compound in a cell culture, the isolating step comprises:
[0127] (a) contacting the cell culture comprising the gibberellin precursor and/or the gibberellin compound with:
   [0128] (i) one or more adsorbent resins in order to bind at least a portion of the gibberellin precursor and/or the gibberellin compound to the resin, thereby isolating the gibberellin precursor and/or the gibberellin compound; or
   [0129] (ii) one or more ion exchange or reversed-phase chromatography columns in order to bind at least a portion of the gibberellin precursor and/or the gibberellin compound in the column, thereby isolating the gibberellin precursor and/or the gibberellin compound; or
[0130] (b) crystallizing and/or extracting the gibberellin precursor and/or the gibberellin compound from the cell culture, thereby isolating the gibberellin precursor and/or the gibberellin compound; or
[0131] (c) separating the cell culture into a solid phase and a liquid phase, wherein the liquid phase comprises the gibberellin precursor and/or the gibberellin compound; and
   [0132] (i) contacting the liquid phase with one or more adsorbent resins in order to bind at least a portion of the gibberellin precursor and/or the gibberellin compound to the resin, thereby isolating the gibberellin precursor and/or the gibberellin compound;
   [0133] (ii) contacting the liquid phase with one or more ion exchange or reversed-phase chromatography columns in order to bind at least a portion of the gibberellin precursor and/or the gibberellin compound in the column, thereby isolating the gibberellin precursor and/or the gibberellin compound; or
   [0134] (iii) crystallizing and/or extracting the gibberellin precursor and/or the gibberellin compound from the liquid phase, thereby isolating the gibberellin precursor and/or the gibberellin compound.

[0135] In one aspect, the method disclosed herein further comprises recovering the gibberellin precursor and/or the gibberellin compound.

[0136] In one aspect, the method disclosed herein further comprises
[0137] (a) one or more steps of converting kaurenoic acid to GA₁₂ and GA₁₄ catalyzed by a first P450 polypeptide; and
[0138] (b) a step of converting GA₁₄ to GA₄ catalyzed by a second P450 polypeptide.

[0139] In one aspect of the methods disclosed herein:
[0140] (a) the first P450 polypeptide comprises:
   [0141] (i) a KAO4 polypeptide having at least 50% sequence identity to the amino acid sequence set forth in SEQ ID NO:74;
   [0142] (ii) a KAO1 polypeptide having at least 50% sequence identity to the amino acid sequence set for in SEQ ID NO:90; or
   [0143] (iii) a KAO3 polypeptide having at least 50% sequence identity to the amino acid sequence set for in SEQ ID NO:146; and
[0144] (b) the second P450 polypeptide comprises:
   [0145] (i) a P450-2 polypeptide having at least 50% sequence identity to the amino acid sequence set forth in SEQ ID NO:80;
   [0146] (ii) a P450-2 polypeptide having at least 50% sequence identity to the amino acid sequence set forth in SEQ ID NO:233;
   [0147] (iii) a P450-2 polypeptide having at least 50% sequence identity to the amino acid sequence set forth in SEQ ID NO 235;
   [0148] (iv) a P450-2 polypeptide having at least 50% sequence identity to the amino acid sequence set forth in SEQ ID NO:237;
   [0149] (v) a P450-2 polypeptide having at least 50% sequence identity to the amino acid sequence set forth in SEQ ID NO:18; or
   [0150] (vi) a CYP112 polypeptide having at least 70% sequence identity to the amino acid sequence set forth in SEQ ID NO:124.

[0151] In one aspect, the method disclosed herein further comprises a step of converting GA₄ to GA₁ catalyzed by a third P450 polypeptide.

[0152] In one aspect of the method disclosed herein, the third P450 polypeptide comprises a P450-3 polypeptide having at least 50% sequence identity to the amino acid sequence set forth in SEQ ID NO:186; or a GA₁₃ₒₓ₋₁ polypeptide having at least 50% sequence identity to the amino acid sequence set forth in SEQ ID NO:98.

[0153] In one aspect, the method disclosed herein further comprises:
[0154] (a) a step of converting GA₄ to GA₇ catalyzed by a 2-ODD polypeptide; and
[0155] (b) a step of converting GA₇ to GA₃ catalyzed by a fourth P450 polypeptide.

[0156] In one aspect of the method disclosed herein:
[0157] (a) the 2-ODD polypeptide comprises a DES polypeptide having at least 50% sequence identity to the amino acid sequence set forth in SEQ IN NO:26; and
[0158] (b) the fourth P450 polypeptide comprises a P450-3 polypeptide having at least 50% sequence identity to the amino acid sequence set forth in SEQ ID NO:186; or a GA₁₃ₒₓ₋₁ polypeptide having at least 50% sequence identity to the amino acid sequence set forth in SEQ ID NO:98.

[0159] In one aspect, the method disclosed herein further comprises:
[0160] (a) one or more steps of converting kaurenoic acid to GA₁₂ and/or GA₁₄ catalyzed by a first P450 polypeptide; and
[0161] (b) a step of converting GA₁₄ to GA₄ catalyzed by a 2-ODD polypeptide.

[0162] In one aspect of the method disclosed herein:
[0163] (a) the first P450 polypeptide comprises a KAO4 polypeptide having at least 50% sequence identity to the amino acid sequence set forth in SEQ ID NO:74; and
[0164] (b) the 2-ODD polypeptide comprises a GA₂₀ₒₓ polypeptide having at least 70% sequence identity to the amino acid sequence set forth in SEQ ID NO:40 or SEQ ID NO:42.

[0165] In one aspect, the method disclosed herein further comprises a step of converting GA₄ to GA₁ catalyzed by a second P450 polypeptide.

[0166] In one aspect of the method disclosed herein, the second P450 polypeptide comprises a P450-3 polypeptide having at least 50% sequence identity to the amino acid sequence set forth in SEQ ID NO:186; or a GA₁₃ₒₓ₋₁ polypeptide having at least 50% sequence identity to the amino acid sequence set forth in SEQ ID NO:98.

[0167] In one aspect, the method disclosed herein further comprises:
[0168] (a) a step of converting GA₄ to GA₇ catalyzed by a second 2-ODD polypeptide; and
[0169] (b) a step of converting GA₇ to GA₃ catalyzed by a second P450 polypeptide.

[0170] In one aspect of the method disclosed herein:
[0171] (a) the second 2-ODD polypeptide comprises a DES polypeptide having at least 50% sequence identity to the amino acid sequence set forth in SEQ ID NO:26; and
[0172] (b) the second P450 polypeptide comprises a P450-3 polypeptide having at least 50% sequence identity to the amino acid sequence set forth in SEQ ID NO:186.

[0173] In one aspect of the method disclosed herein the recombinant host cell is grown in a fermentor at a temperature for a period of time, wherein the temperature and period of time facilitate the production of the gibberellin precursor and/or the gibberellin compound.

[0174] In one aspect of the methods disclosed herein, the gibberellin compound comprises GA₃ and its precursors, metabolites, or related compounds, including: GA₁, GA₄, GA₅, GA₇, GA₉, GA₁₂, GA₁₃, GA₁₄, GA₁₅, GA₁₉, GA₂₀, GA₂₄, GA₂₅, GA₃₆, GA₃₇, GA₄₄, GA₅₃, and/or GA₁₁₀.

[0175] In one aspect of the methods disclosed herein, the recombinant host comprises a plant cell, a mammalian cell, an insect cell, a fungal cell, an algal cell or a bacterial cell.

[0176] The invention further provides a cell culture, comprising the recombinant host cell disclosed herein, the cell culture further comprising:
[0177] (a) the gibberellin precursor and/or the gibberellin compound produced by the recombinant host cell;
[0178] (b) a carbon source; and
[0179] (c) supplemental nutrients comprising trace metals, vitamins, salts, YNB, a nitrogen source, and/or amino acids;

[0180] wherein one or more gibberellin precursors and/or the gibberellin compounds are present at a concentration of at least 100 mg/liter of the cell culture.

[0181] The invention further provides a cell lysate from the recombinant host cell disclosed herein and grown in the cell culture, comprising:
[0182] (a) the gibberellin precursor and/or the gibberellin compound produced by the recombinant host cell;
[0183] (b) a carbon source; and
[0184] (c) supplemental nutrients comprising trace metals, vitamins, salts, YNB, and/or amino acids;

[0185] wherein one or more gibberellin precursors and/or the gibberellin compounds are present at a concentration of at least 100 mg/liter of the cell culture.

[0186] These and other features and advantages of the present invention will be more fully understood from the following detailed description taken together with the accompanying claims. It is noted that the scope of the claims is defined by the recitations therein and not by the specific discussion of features and advantages set forth in the present description.

### BRIEF DESCRIPTION OF THE DRAWINGS

[0187] The following detailed description of the embodiments of the present invention can be best understood when read in conjunction with the following drawings, where like structure is indicated with like reference numerals and in which:

[0188] FIG. 1 shows a general chemical structure for a gibberellin, with carbon atoms numbered according to IUPAC nomenclature.

[0189] FIG. 2A shows a schematic of gibberellin biosynthesis pathways. The starting material for gibberellin biosynthesis, ent-kaurenoic acid, is formed by successive conversions of geranylgeranyl diphosphate (GGPP) to ent-copalyl diphosphate (ent-copalyl-PP), to ent-Kaurene, and finally to ent-kaurenoic acid, catalyzed by a copalyl diphosphate synthase (CDPS) enzyme, a kaurene synthase (KS) enzyme, and a kaurene oxidase (KO) enzyme, respectively.

[0190] FIG. 2B shows a schematic of gibberellin biosynthesis in fungi, plants, and/or bacteria.

[0191] FIG. 3 shows a biosynthetic route from kaurenoic acid to GA₃ in an S. cerevisiae strain comprising genes encoding a G. fujikuroi P450-2-1 polypeptide (SEQ ID NO:79, SEQ ID NO:80), a G. fujikuroi P450-3-4 polypeptide (SEQ ID NO:185, SEQ ID NO:186), a Sphaceloma manihoticola KAO4 polypeptide (SEQ ID NO:73, SEQ ID NO:74), a G. fujikuroi DES-1 polypeptide (SEQ ID NO:25, SEQ ID NO:26), and an A. niger cytochrome P450 reductase-16 (CPR16) polypeptide (SEQ ID NO:157, SEQ ID NO:158), as described in Example 2.

[0192] FIG. 4A shows gibberellin accumulation by an S. cerevisiae strain comprising genes encoding a truncated CDPS polypeptide (SEQ ID NO:179, SEQ ID NO:180), a KS polypeptide (SEQ ID NO:181, SEQ ID NO:182), a first KO polypeptide (SEQ ID NO:171, SEQ ID NO:172), a second KO polypeptide (SEQ ID NO:169, SEQ ID NO:170), a CPR polypeptide (SEQ ID NO:167, SEQ ID NO:168), an ERG20-GGPPS7 polypeptide (SEQ ID NO:195, SEQ ID NO:196), and either i) genes encoding a G. fujikuroi P450-2-1 polypeptide (SEQ ID NO:79, SEQ ID NO:80), G. fujikuroi P450-3-4 polypeptide (SEQ ID NO:185, SEQ ID NO:186), S. manihoticola KAO4 polypeptide (SEQ ID NO:73, SEQ ID NO:74), G. fujikuroi DES-1 polypeptide (SEQ ID NO:25, SEQ ID NO:26), G. fujikuroi cytochrome B5 polypeptide (SEQ ID NO:159, SEQ ID NO:160), and G. fujikuroi cytochrome B5 reductase polypeptide (SEQ ID NO:1, SEQ ID NO:2) (Strain “N”), ii) genes encoding a G. fujikuroi P450-2-1 polypeptide (SEQ ID NO:79, SEQ ID NO:80), G. fujikuroi P450-3-4 polypeptide (SEQ ID NO:185, SEQ ID NO:186), S. manihoticola KAO4 polypeptide (SEQ ID NO:73, SEQ ID NO:74), and G. fujikuroi DES-1 polypeptide (SEQ ID NO:25, SEQ ID NO:26) (Strain “I”), or iii) genes encoding a Cucurbita maxima GA₂₀ₒₓ₋₄ polypeptide (SEQ ID NO:39, SEQ ID NO:40), G. fujikuroi P450-3-4 polypeptide (SEQ ID NO:185, SEQ ID NO:186), S. manihoticola KAO4 polypeptide (SEQ ID NO:73, SEQ ID NO:74), G. fujikuroi DES-1 polypeptide (SEQ ID NO:25, SEQ ID NO:26), and A. niger CPR16 (SEQ ID NO:157, SEQ ID NO:158) (Strain “F”).

[0193] FIG. 4B shows a Liquid Chromatography-Mass Spectrometry (LC-MS) chromatogram analyzing accumulation of gibberellins and gibberellin precursors, including GA₃, GA₄, GA₁₂, GA₁₄, and kaurenoic acid by an S. cerevisiae strain (strain “A”) comprising genes encoding a truncated CDPS polypeptide (SEQ ID NO:179, SEQ ID NO:180), a KS polypeptide (SEQ ID NO:181, SEQ ID NO:182), a first KO polypeptide (SEQ ID NO:171, SEQ ID NO:172), a second KO polypeptide (SEQ ID NO:169, SEQ ID NO:170), a CPR polypeptide (SEQ ID NO:167, SEQ ID NO:168), an ERG20-GGPPS7 polypeptide (SEQ ID NO:195, SEQ ID NO:196), a G. fujikuroi P450-2-1 polypeptide (SEQ ID NO:79, SEQ ID NO:80), a G. fujikuroi P450-3-1 polypeptide (SEQ ID NO:185, SEQ ID NO:186), an S. manihoticola KAO4 polypeptide (SEQ ID NO:73, SEQ ID NO:74), a G. fujikuroi DES-1 polypeptide (SEQ ID NO:25, SEQ ID NO:26), and an A. niger CPR16 polypeptide (SEQ ID NO:157, SEQ ID NO:158), as described in Example 2.

[0194] FIG. 5 shows a biosynthetic route from ent-kaurenoic acid to GA₃ in an S. cerevisiae strain comprising S. manihoticola KAO4 polypeptide (SEQ ID NO:73, SEQ ID NO:74), G. fujkuroi P450-3-4 (SEQ ID NO:185, SEQ ID NO:186), A. niger CPR16 (SEQ ID NO:157, SEQ ID NO:158), G. fujikuroi DES-1 (SEQ ID NO:25, SEQ ID NO:26) and either Arabidopsis thaliana GA₂₀ₒₓ₋₁ (SEQ ID NO:41, SEQ ID NO:42) or C. maxima GA₂₀ₒₓ₋₄ (SEQ ID NO:39, SEQ ID NO:40), as described in Example 2.

[0195] FIG. 6A shows a Liquid Chromatography Time of Flight (LC-TOF) mass spectrum of the peak corresponding to GA₃ from a kaurenoic acid-producing S. cerevisiae strain comprising G. fujikuroi P450-2-1 (SEQ ID NO:79, SEQ ID NO:80), G. fujikuroi P450-3-4 (SEQ ID NO:185, SEQ ID NO:186), S. manihoticola KAO4 polypeptide (SEQ ID NO:73, SEQ ID NO:74), and G. fujikuroi DES-1 (SEQ ID NO:25, SEQ ID NO:26), as described in Example 2.

[0196] FIG. 6B shows an LC-TOF mass spectrum of the peak corresponding to GA₃ from an S. cerevisiae strain comprising C. maxima GA₂₀ₒₓ₋₄ (SEQ ID NO:39, SEQ ID NO:40).

[0197] FIG. 7 shows a biosynthetic route from ent-kaurenoic acid to GA₁₂ in an ent-kaurenoic acid-producing S. cerevisiae strain comprising a KAO, as described in Example 6.

[0198] FIG. 8 shows accumulation of GA₁₂ (as measured by area-under-the-curve) for S. cerevisiae strains comprising KAO4 (SEQ ID NO:73, SEQ ID NO:74), KAO5 (SEQ ID NO:61, SEQ ID NO:62), KAO6 (SEQ ID NO:59, SEQ ID NO:60), KAO9 (SEQ ID NO:67, SEQ ID NO:68), KAO10 (SEQ ID NO:57, SEQ ID NO:58), or KAO11 (SEQ ID NO:63, SEQ ID NO:64) as well as C. maxima Ga₇ₒₓ₋₁ (SEQ ID NO:151, SEQ ID NO:152), as described in Example 6.

[0199] FIG. 9A shows a biosynthetic route from ent-kaurenoic acid to GA₉ and GA₂₀, as described in Example 6.

[0200] FIG. 9B shows GA₉ and GA₂₀ accumulation in an ent-kaurenoic acid-producing S. cerevisiae strain comprising GA₂₀ₒₓ (SEQ ID NO:39, SEQ ID NO:40) and Oryza sativa GA₁₃ₒₓ (SEQ ID NO:97, SEQ ID NO:98).

[0201] FIG. 10 shows an exemplary biosynthetic route from ent-kaurenoic acid to GA₉ by an S. cerevisae strain comprising Pisum sativum KAO11 (SEQ ID NO:63, SEQ ID NO:64), C. maxima (SEQ ID NO:151, SEQ ID NO:152), Bradyrhizobium diazoefficiens alcohol dehydrogenase (ADH) (SEQ ID NO:115, SEQ ID NO:116), and B. diazoefficiens CYP112 (SEQ ID NO:123, SEQ ID NO:124), as described in Example 7.

[0202] FIG. 11A shows a Liquid Chromatography Mass Spectrometry (LC-MS) Total Ion Current (TIC) chromatogram of a GA₉ standard.

[0203] FIG. 11B shows an LC-MS Selected Ion Recording (SIR) chromatogram, wherein the peak having an m/z 315.16 corresponds to GA₉ accumulated by an S. cerevisiae strain comprising P. sativum KAO11 (SEQ ID NO:63, SEQ ID NO:64), C. maxima (SEQ ID NO:151, SEQ ID NO:152), B. diazoefficiens ADH (SEQ ID NO:115, SEQ ID NO:116), B. diazoefficiens CYP112 (SEQ ID NO:123, SEQ ID NO:124), Pseudomonas putida ferredoxin (SEQ ID NO:147, SEQ ID NO:148), and P. putida ferredoxin reductase (SEQ ID NO:149, SEQ ID NO:150).

[0204] FIG. 11C shows an LC-MS TIC chromatogram of GA₉ accumulation by the S. cerevisiae strain described for FIG. 11B. See Example 7.

[0205] FIG. 12 shows a biosynthetic route for production of GA₄ from ent-kaurenoic acid by S. cerevisae strain comprising S. manihoticola KAO4 polypeptide (SEQ ID NO:73, SEQ ID NO:74), KO (SEQ ID NO:169, SEQ ID NO:170), B. diazoefficiens ADH (SEQ ID NO:115, SEQ ID NO:116), and B. diazoefficiens CYP112 (SEQ ID NO:123, SEQ ID NO:124), as described in Example 7.

[0206] FIG. 13A shows an LC-MS TIC chromatogram of a GA₄ standard.

[0207] FIG. 13B shows a LC-MS SIR chromatogram, wherein the peak having an m/z 331.16 corresponds to GA₄ accumulated by an S. cerevisiae strain comprising S. manihoticola KAO4 polypeptide (SEQ ID NO:73, SEQ ID NO:74), KO (SEQ ID NO:169, SEQ ID NO:170), B. diazoefficiens ADH (SEQ ID NO:115, SEQ ID NO:116), and B. diazoefficiens CYP112 (SEQ ID NO:123, SEQ ID NO:124), P. putida ferredoxin (SEQ ID NO:147, SEQ ID NO:148), and P. putida ferredoxin reductase (SEQ ID NO:149, SEQ ID NO:150).

[0208] FIG. 13C shows an LC-MS TIC chromatogram of GA4 accumulation by the S. cerevisiae strain described for FIG. 13B.

[0209] FIG. 14A shows kaurenoic acid levels in an S. cerevisiae strain comprising a gene encoding a truncated CDPS polypeptide (SEQ ID NO:179, SEQ ID NO:180), a KS polypeptide (SEQ ID NO:181, SEQ ID NO:182), a KO polypeptide (SEQ ID NO:171, SEQ ID NO:172), a CPR polypeptide (SEQ ID NO:167, SEQ ID NO:168), and an ERG20-GGPPS7 polypeptide (SEQ ID NO:195, SEQ ID NO:196), and either S. manihoticola KAO4 polypeptide (SEQ ID NO:73, SEQ ID NO:74) or G. fujikuroi KAO1 polypeptide (SEQ ID NO:89, SEQ ID NO:90).

[0210] FIG. 14B shows GA₁₄ accumulation in an S. cerevisiae strain comprising a gene encoding a truncated CDPS polypeptide (SEQ ID NO:179, SEQ ID NO:180), a KS polypeptide (SEQ ID NO:181, SEQ ID NO:182), a KO polypeptide (SEQ ID NO:171, SEQ ID NO:172), a CPR polypeptide (SEQ ID NO:167, SEQ ID NO:168), and an ERG20-GGPPS7 polypeptide (SEQ ID NO:195, SEQ ID NO:196), and either S. manihoticola KAO4 polypeptide (SEQ ID NO:73, SEQ ID NO:74) or G. fujikuroi KAO1 polypeptide (SEQ ID NO:89, SEQ ID NO:90).

[0211] FIG. 15 shows gibberellin accumulation in an S. cerevisiae strain comprising a gene encoding a truncated CDPS polypeptide (SEQ ID NO:179, SEQ ID NO:180), a KS polypeptide (SEQ ID NO:181, SEQ ID NO:182), a KO polypeptide (SEQ ID NO:171, SEQ ID NO:172), a CPR polypeptide (SEQ ID NO:167, SEQ ID NO:168), and an ERG20-GGPPS7 polypeptide (SEQ ID NO:195, SEQ ID NO:196), and either A. niger CPR16 (SEQ ID NO:157, SEQ ID NO:158), Phaeosphaeria sp. CPR14 (SEQ ID NO:99, SEQ ID NO:100), or Candida apicola CPR15 (SEQ ID NO:139, SEQ ID NO:140).

[0212] FIG. 16 shows gibberellin accumulation in an S. cerevisiae strain comprising a gene encoding a truncated DAP1-2 polypeptide (SEQ ID NO:212, SEQ ID NO:213), a ICE2-2 polypeptide (SEQ ID NO:205, SEQ ID NO:206), a CDPS-KS6 polypeptide (SEQ ID NO:101, SEQ ID NO:102), a KS5 polypeptide (SEQ ID NO:181, SEQ ID NO:182), a FfCytB5-1 polypeptide (SEQ ID NO:159, SEQ ID NO:160), a KAO3 polypeptide (SEQ ID NO:145, SEQ ID NO:146), a CPR19 polypeptide (SEQ ID NO: 193; SEQ ID NO:194), a CPR12 polypeptide (SEQ ID NO:167, SEQ ID NO:168), a RsKO polypeptide (SEQ ID NO:169, SEQ ID NO:170), a GGPPS-7 polypeptide (SEQ ID NO:177, SEQ ID NO:178), a KO1 polypeptide (SEQ ID NO:171, SEQ ID NO:172) and a P450-2-1 polypeptide (SEQ ID NO:79, SEQ ID NO:80).

[0213] FIG. 17 shows chromatograms of sample B1 (top panel) and a GA₃ standard (bottom panel) from Example 11. The peak maxima of the EICs exhibit the same retention time.

[0214] FIG. 18A shows mass spectra from sample B1 of Example 11. Both sample B1 and GA₃ standard (FIG. 18B) show the [M-H]⁻ ion at 345.1336 corresponding to GA₃. MRM analysis lead to the formation of the fragments at m/z 143 and 221, which are the most abundant fragment ions of GA₃.

[0215] FIG. 18B shows mass spectra from a GA₃ standard from Example 11. Both GA₃ standard and B1 sample (FIG. 18A) show the [M-H]⁻ ion at 345.1336 corresponding to GA₃. MRM analysis lead to the formation of the fragments at m/z 143 and 221, which are the most abundant fragment ions of GA₃.

### DETAILED DESCRIPTION OF THE INVENTION

[0216] Before describing the present invention in detail, a number of terms will be defined. As used herein, the singular forms “a,” “an,” and “the” include plural referents unless the context clearly dictates otherwise. For example, reference to a “nucleic acid” means one or more nucleic acids.

[0217] It is noted that terms like “preferably,” “commonly,” and “typically” are not utilized herein to limit the scope of the claimed invention or to imply that certain features are critical, essential, or even important to the structure or function of the claimed invention. Rather, these terms are merely intended to highlight alternative or additional features that can or cannot be utilized in a particular embodiment of the present invention.

[0218] For the purposes of describing and defining the present invention it is noted that the term “substantially” is utilized herein to represent the inherent degree of uncertainty that can be attributed to any quantitative comparison, value, measurement, or other representation. The term “substantially” is also utilized herein to represent the degree by which a quantitative representation can vary from a stated reference without resulting in a change in the basic function of the subject matter at issue.

[0219] Methods well known to those skilled in the art can be used to construct genetic expression constructs and recombinant cells according to this invention. These methods include in vitro recombinant DNA techniques, synthetic techniques, in vivo recombination techniques, and polymerase chain reaction (PCR) techniques. See, for example, techniques as described in Green & Sambrook, 2012, MOLECULAR CLONING: A LABORATORY MANUAL, Fourth Edition, Cold Spring Harbor Laboratory, New York; Ausubel et al., 1989, CURRENT PROTOCOLS IN MOLECULAR BIOLOGY, Greene Publishing Associates and Wiley Interscience, New York, and PCR Protocols: A Guide to Methods and Applications (Innis et al., 1990, Academic Press, San Diego, Calif.).

[0220] As used herein, the terms “polynucleotide,” “nucleotide,” “oligonucleotide,” and “nucleic acid” can be used interchangeably to refer to nucleic acid comprising DNA, RNA, derivatives thereof, or combinations thereof, in either single-stranded or double-stranded embodiments depending on context as understood by the skilled worker.

[0221] As used herein, the terms “microorganism,” “microorganism host,” “microorganism host cell,” “recombinant host,” and “recombinant host cell” can be used interchangeably. As used herein, the term “recombinant host” is intended to refer to a host, the genome of which has been augmented by at least one DNA sequence. The term “transformant(s)” is intended to refer a host to which at least one DNA sequence has been introduced. Such DNA sequences for “recombinant host” and “transformant(s)” include but are not limited to genes that are not naturally present, DNA sequences that are not normally transcribed into RNA or translated into a protein (“expressed”), and other genes or DNA sequences which one desires to introduce into a host. It will be appreciated that typically the genome of a recombinant host described herein is augmented through stable introduction of one or more recombinant genes. Generally, introduced DNA is not originally resident in the host that is the recipient of the DNA, but it is within the scope of this disclosure to isolate a DNA segment from a given host, and to subsequently introduce one or more additional copies of that DNA into the same host, e.g., to enhance production of the product of a gene or alter the expression pattern of a gene. In some instances, the introduced DNA will modify or even replace an endogenous gene or DNA sequence by, e.g., homologous recombination or site-directed mutagenesis. Suitable recombinant hosts include microorganisms, for example bacteria, fungi or yeast.

[0222] As used herein, the term “recombinant gene” refers to a gene or DNA sequence that is introduced into a recipient host, regardless of whether the same or a similar gene or DNA sequence may already be present in such a host. “Introduced,” or “augmented” in this context, is known in the art to mean introduced or augmented by the hand of man. Thus, a recombinant gene can be a DNA sequence from another species or can be a DNA sequence that originated from or is present in the same species but has been incorporated into a host by recombinant methods to form a recombinant host. It will be appreciated that a recombinant gene that is introduced into a host can be identical to a DNA sequence that is normally present in the host being transformed, and is introduced to provide one or more additional copies of the DNA to thereby permit overexpression or modified expression of the gene product of that DNA. In some aspects, said recombinant genes are encoded by cDNA. In other embodiments, recombinant genes are synthetic and/or codon-optimized for expression in Saccharomyces cerevisiae (S. cerevisiae).

[0223] As used herein, the term “engineered biosynthetic pathway” refers to a biosynthetic pathway that occurs in a recombinant host, as described herein. In some aspects, one or more steps of the biosynthetic pathway do not naturally occur in an unmodified host. In some embodiments, a heterologous version of a gene is introduced into a host that comprises an endogenous version of the gene.

[0224] As used herein, the term “endogenous” gene refers to a gene that originates from and is produced or synthesized within a particular organism, tissue, or cell. In some embodiments, the endogenous gene is a yeast gene. In some embodiments, the gene is endogenous to S. cerevisiae, including, but not limited to S. cerevisiae strain S288C. In some embodiments, an endogenous yeast gene is overexpressed. As used herein, the term “overexpress” is used to refer to the expression of a gene in an organism at levels higher than the level of gene expression in a wild type organism. In some embodiments, an endogenous yeast gene, for example ADH, is deleted. As used herein, the terms “deletion,” “deleted,” “knockout,” and “knocked out” can be used interchangeably to refer to an endogenous gene that has been manipulated to no longer be expressed in an organism, including, but not limited to, S. cerevisiae.

[0225] As used herein, the terms “heterologous sequence” and “heterologous coding sequence” are used to describe a sequence derived from a species other than the recombinant host. In some embodiments, the recombinant host is an S. cerevisiae cell, and a heterologous sequence is derived from an organism other than S. cerevisiae. A heterologous coding sequence, for example, can be from a prokaryotic microorganism, a eukaryotic microorganism, a plant, an animal, an insect, or a fungus different than the recombinant host expressing the heterologous sequence. In some embodiments, a coding sequence is a sequence that is native to the host.

[0226] A “selectable marker” can be one of any number of genes that complement host cell auxotrophy, provide antibiotic resistance, or result in a color change. Non-limiting examples of a selectable marker can include a URA3 marker and a NatMx maker. Linearized DNA fragments of the gene replacement vector then are introduced into the cells using methods well known in the art. Integration of the linear fragments into the genome and the disruption of the gene can be determined based on the selection marker and can be verified by, for example, PCR or Southern blot analysis. Subsequent to its use in selection, a selectable marker can be removed from the genome of the host cell by, e.g., Cre-LoxP systems (see e.g., U.S. 2006/0014264). Alternatively, a gene replacement vector can be constructed in such a way as to include a portion of the gene to be disrupted, where the portion is devoid of any endogenous gene promoter sequence and encodes none, or an inactive fragment of, the coding sequence of the gene.

[0227] As used herein, the terms “variant” and “mutant” are used to describe a protein sequence that has been modified at one or more amino acids, compared to the wild-type sequence of a particular protein.

[0228] As used herein, the term “inactive fragment” is a fragment of the gene that encodes a protein having, e.g., less than about 10% (e.g., less than about 9%, less than about 8%, less than about 7%, less than about 6%, less than about 5%, less than about 4%, less than about 3%, less than about 2%, less than about 1%, or 0%) of the activity of the protein produced from the full-length coding sequence of the gene. Such a portion of a gene is inserted in a vector in such a way that no known promoter sequence is operably linked to the gene sequence, but that a stop codon and a transcription termination sequence are operably linked to the portion of the gene sequence. This vector can be subsequently linearized in the portion of the gene sequence and transformed into a cell. By way of single homologous recombination, this linearized vector is then integrated in the endogenous counterpart of the gene with inactivation thereof.

[0229] As used herein, the term “gibberellin” refers to a diterpene plant hormone having the structure of the molecule shown in Formula I and FIG. 1. Gibberellins include, but are not limited to, gibberellin A1 (GA₁), gibberellin A3 (GA₃), epoxide gibberellin A3 (epoxide GA₃), gibberellin A4 (GA₄), gibberellin A5 (GA₅), gibberellin A7 (GA₇), gibberellin A9 (GA₉), gibberellin A12 (GA₁₂), gibberellin A13 (GA₁₃), gibberellin A14 (GA₁₄), gibberellin A15 (GA₁₅), gibberellin A19 (GA₁₉), gibberellin A20 (GA₂₀), gibberellin A24 (GA₂₄), gibberellin A25 (GA₂₅), gibberellin A36 (GA₃₆), gibberellin A37 (GA₃₇), gibberellin A44 (GA₄₄), gibberellin A53 (GA₅₃), and gibberellin A110 (GA₁₁₀). In particular, the gibberellin can be a gibberellin described in Table 1, Formula I, and FIG. 1.

[chemical structure]

TABLE 1
Gibberellin structure.

| | R¹ | R² | R³ | R⁴ | R¹⁰ | R⁸ |
|---|---|---|---|---|---|---|
| GA₁ | | | β-OH | —O—C10 | —O—C19 | —OH |
| GA₃ | ═C2 | ═C1 | β-OH | —O—C10 | —O—C19 | —OH |
| GA₄ | | | β-OH | —O—C10 | —O—C19 | |
| GA₅ | | ═C3 | ═C2 | —O—C10 | —O—C19 | —OH |
| GA₇ | ═C2 | ═C1 | β-OH | —O—C10 | —O—C19 | |
| GA₉ | | | | —O—C10 | —O—C19 | |
| GA₁₂ | | | | —OH | —CH₃ | |
| GA₁₄ | | | β-OH | —OH | —CH₃ | |
| GA₁₅ | | | | —OH | —CH₂OH | |
| open lactone | | | | | | |
| GA₁₅ | | | | —O—CH₂—C10 | —CH₂—O—C19 | |
| GA₁₉ | | | | —OH | —CHO | —OH |
| GA₂₀ | | | | —O—C10 | —O—C19 | —OH |
| GA₂₄ | | | | —OH | —CHO | |
| GA₄₄ | | | | —O—CH₂—C10 | —CH₂—O—C19 | —OH |
| GA₅₃ | | | | —OH | —CH₃ | —OH |

R⁵ = —OH,
R¹² = —CH₃,
all other R = —H

[0230] As used herein, the term “gibberellin precursor” refers to intermediate compounds in a gibberellin biosynthetic pathway. Gibberellin precursors include, but are not limited to, GGPP, ent-copalyl-diphosphate, ent-kaurene, ent-kaurenoic acid, and ent-kaurenoic acid-7-α-OH kaurenoic acid. See, e.g., FIG. 2. In some embodiments, gibberellin precursors are gibberellin aldehydes, such as GA₁₂ aldehyde or GA₁₄ aldehyde. In some embodiments, gibberellin precursors are themselves gibberellin compounds. For example, GA₇ and GA₅ are gibberellin precursors to GA₃.

[0231] In some aspects, gibberellins and gibberellin precursors are accumulated in an ent-kaurenoic acid-producing host. Recombinant ent-kaurenoic acid-producing and terpene-producing Saccharomyces cerevisiae (S. cerevisiae) strains are described in WO 2011/153378, WO 2013/022989, WO 2014/122227, and WO 2014/122328, each of which has been incorporated by reference herein in its entirety. Methods of producing terpenes in recombinant hosts, by whole cell bio-conversion, and in vitro are also described in WO 2011/153378, WO 2013/022989, WO 2014/122227, and WO 2014/122328.

[0232] In some embodiments, gibberellins and/or gibberellin precursors are produced in vivo through expression of one or more enzymes involved in a gibberellin biosynthetic pathway in a recombinant host. For example, an ent-kaurenoic acid-producing recombinant host expressing one or more of a gene encoding a cytochrome P450 (P450) monooxygenase polypeptide, a gene encoding a cytochrome P450 reductase (CPR) polypeptide, and a gene a 2-ODD polypeptide can accumulate a gibberellin or gibberellin precursor in vivo. See, e.g., FIGS. 3, 5, 7, 9A, 10, and 12. The skilled worker will appreciate that one or more of these genes can be endogenous to the host provided that at least one (and in some embodiments, all) of these genes is a recombinant gene introduced into the recombinant host.

[0233] In some embodiments, gibberellins and/or gibberellin precursors are produced through contact of a gibberellin precursor with one or more enzymes involved in the gibberellin pathway in vitro. For example, contacting GA₇ with a cytochrome P450 polypeptide can result in production of GA₃ in vitro. In some embodiments, a gibberellin is produced through contact of a gibberellin precursor with one or more enzymes involved in the gibberellin pathway in vitro. For example, contacting ent-kaurene with a KO enzyme can result in production of ent-kaurenoic acid in vitro.

[0234] In some embodiments, a gibberellin or gibberellin precursor is produced by whole cell bioconversion. For whole cell bioconversion to occur, a host cell expressing one or more enzymes involved in the gibberellin pathway takes up and modifies a gibberellin precursor in the cell; following modification (e.g., addition of a double bond or oxidation) in vivo, a gibberellin remains in the cell and/or diffuses or is excreted into the culture medium. For example, a host cell expressing a gene encoding a cytochrome P450 monooxygenase polypeptide can take up GA₇ and oxidize C13 of GA₇ in the cell; following such a modification in vivo, GA₃ can be excreted into the culture medium. In some embodiments, the cell can be permeabilized to take up a substrate to be modified or to excrete a modified product.

[0235] In some embodiments, one or more gibberellin precursors and/or one or more gibberellins are produced by co-culturing of two or more hosts. In some embodiments, one or more hosts, each expressing one or more enzymes involved in the gibberellin pathway, produce one or more gibberellin precursors and/or one or more gibberellins. For example, a host comprising a GGPPS, an CDPS, and/or a KO and a host comprising a cytochrome P450 monooxygenase, a cytochrome P450 reductase, and/or a 2-ODD produce one or more gibberellins.

[0236] In some aspects, a host comprises a heterologous gene encoding a GGPPS polypeptide. In some embodiments, the GGPPS polypeptide is a GGPPS polypeptide having the amino acid sequence set forth in SEQ ID NO:50, SEQ ID NO:134, or SEQ ID NO:178. The GGPPS polypeptide can catalyze conversion of farnesyl diphosphate (FPP) to GGPP.

[0237] In some aspects, a host comprises a heterologous gene encoding a CDPS polypeptide. In some embodiments, the CDPS polypeptide is a CDPS polypeptide having the amino acid sequence set forth in SEQ ID NO:102, SEQ ID NO:106, SEQ ID NO:108, or SEQ ID NO:180 or a bi-functional a CDPS polypeptide having the amino acid sequence set forth in SEQ ID NO:104, SEQ ID NO:227 or SEQ ID NO:229. The CDPS polypeptide can catalyze conversion of GGPP to ent-copalyl pyrophosphate. In some embodiments, the bi-functional CDPS polypeptide of SEQ ID NO:104 further comprises a P571S and/or L654P substitution. In some embodiments, a host comprising the mutant CDPS polypeptide accumulates greater levels of gibberellins, as compared to a host that does not comprise a gene encoding a mutant CDPS polypeptide.

[0238] In some aspects, a host comprises a heterologous gene encoding a KS polypeptide. In some embodiments, the KS polypeptide is a KS polypeptide having the amino acid sequence set forth in SEQ ID NO:102 or SEQ ID NO:106. The KS polypeptide can catalyze conversion of ent-copalyl pyrophosphate to ent-kaurene.

[0239] In some aspects, a host comprises a heterologous gene encoding a KO polypeptide. In some embodiments, the KO polypeptide is a KO polypeptide having the amino acid sequence set forth in SEQ ID NO:82, SEQ ID NO:164, SEQ ID NO:170, or SEQ ID NO:172. The KO polypeptide can catalyze conversion of ent-kaurene to ent-kaurenoic acid.

[0240] In some aspects, a host comprises a gene encoding a KAO polypeptide. The KAO polypeptide can be a plant-derived KAO polypeptide. In some embodiments, the KAO polypeptide is a KAO polypeptide having the amino acid sequence set forth in SEQ ID NO:56, SEQ ID NO:58, SEQ ID NO:60, SEQ ID NO:62, SEQ ID NO:64, SEQ ID NO:66, SEQ ID NO:68, SEQ ID NO:74, SEQ ID NO:88, SEQ ID NO:90, or SEQ ID NO:146. The KAO polypeptide can catalyze, for example, conversion of ent-kaurenoic acid to ent-7α-OH kaurenoic acid, ent-7α-OH kaurenoic acid to GA₁₂ aldehyde, GA₁₂ aldehyde to GA₁₂, and GA₁₂ aldehyde to GA₁₄ aldehyde. See, e.g., FIGS. 3, 5, 7, 9A, 10, and 12 and Example 6.

[0241] In some embodiments, a cytochrome B5 polypeptide (i.e., a cytochrome B5 polypeptide of SEQ ID NO:160) and/or a cytochrome B5 reductase polypeptide (i.e., a cytochrome B5 reductase polypeptide of SEQ ID NO:2) increases activity of a KAO polypeptide and/or a cytochrome P450 polypeptide. In some aspects, increased activity of a KAO polypeptide is evidenced by increased levels of GA₁₄ and GA₃ in an S. cerevisiae strain comprising a gene encoding a cytochrome B5 polypeptide and a gene encoding a cytochrome b5 reductase polypeptide. See Example 2 and FIG. 4A.

[0242] In some aspects, a host comprises a gene encoding a P450-1 polypeptide. The P450-1 polypeptide can be a fungus-derived P450-1 polypeptide. In some embodiments, the P450-1 polypeptide is a P450-1 polypeptide having the amino acid sequence set forth in SEQ ID NO:74, SEQ ID NO:88, SEQ ID NO:90, or SEQ ID NO:146. The P450-1 polypeptide can catalyze conversion of ent-kaurenoic acid to ent-7α-OH kaurenoic acid, ent-7α-OH kaurenoic acid to GA₁₂ aldehyde, and GA₁₂ aldehyde to GA₁₄ aldehyde. In some aspects, a P450-1 polypeptide can have KAO and GA₃ₒₓ activity. See Example 8. The fungal KAO enzymes (e.g., S. manihoticola KAO4 polypeptide (SEQ ID NO:73, SEQ ID NO:74) and G. fujikuroi KAO1 polypeptide (SEQ ID NO:89, SEQ ID NO:90) also have GA₃ₒₓ activity.

[0243] In some aspects, a host comprises a gene encoding a GA 20-oxidase (GA₂₀ₒₓ) polypeptide. The GA₂₀ₒₓ polypeptide can be a plant-derived GA₂₀ₒₓ polypeptide. In some embodiments, the GA₂₀ₒₓ polypeptide comprises a GA₂₀ₒₓ polypeptide having the amino acid sequence set forth in SEQ ID NO:32, SEQ ID NO:34, SEQ ID NO:40, or SEQ ID NO:42. The GA₂₀ₒₓ polypeptide is a 2-ODD polypeptide and can catalyze conversion of GA₁₄ to GA₄, GA₁₂ to GA₁₅, GA₂₄ to GA₉, GA₅₃ to GA₄₄, and GA₄₄ to GA₁₉. See FIGS. 5 and 9A.

[0244] In other embodiments, a host comprises a GA 7-oxidase (GA₇ₒₓ) and/or a GA 3-oxidase (GA₃ₒₓ). GA₇ₒₓ and GA₃ₒₓ polypeptides can be plant-derived 2-ODD polypeptides. In some embodiments, the GA₇ₒₓ polypeptide comprises a GA₇ₒₓ polypeptide having the amino acid sequence set forth in SEQ ID NO:16 or SEQ ID NO:162. In some embodiments, the GA₃ₒₓ polypeptide comprises a GA₃ₒₓ polypeptide having the amino acid sequence set forth in SEQ ID NO:28, SEQ ID NO:30, SEQ ID NO:36, or SEQ ID NO:44.

[0245] In some embodiments, a host comprises a GA 13-oxidase (GA₁₃ₒₓ). A GA₁₃ₒₓ polypeptide can be a plant-derived GA₁₃ₒₓ polypeptide. In some embodiments, the GA₁₃ₒₓ polypeptide comprises a GA₁₃ₒₓ polypeptide having the amino acid sequence set forth in SEQ ID NO:72, SEQ ID NO:78, or SEQ ID NO:98. In some embodiments, a cytochrome B5 polypeptide (i.e., a cytochrome B5 polypeptide of SEQ ID NO:160) and/or a cytochrome B5 reductase polypeptide (i.e., a cytochrome B5 reductase polypeptide of SEQ ID NO:2) increases activity of a GA₁₃ₒₓ polypeptide. In some embodiments, the GA₁₃ₒₓ polypeptide can catalyze conversion of GA₉ to GA₂₀. See FIG. 9A.

[0246] In some aspects, a host comprises a gene encoding a P450-2 polypeptide. The P450-2 polypeptide can be a fungus-derived P450-2 polypeptide. In some embodiments, the P450-2 polypeptide comprises a P450-2 polypeptide having the amino acid sequence set forth in SEQ ID NO:14, SEQ ID NO:18, SEQ ID NO:70, SEQ ID NO:80, SEQ ID NO:94, SEQ ID NO:142, SEQ ID NO:233, SEQ ID NO:235, or SEQ ID NO:237. The P450-2 polypeptide can catalyze conversion of GA₁₄ to GA₄ and conversion of GA₁₂ to GA₉. See FIG. 3.

[0247] In some aspects, a host comprises a gene encoding a P450-3 polypeptide. The P450-3 polypeptide can be a fungus-derived P450-3 polypeptide. In some embodiments, the P450-3 polypeptide comprises a P450-3 polypeptide having the amino acid sequence set forth in SEQ ID NO:46, SEQ ID NO:144, SEQ ID NO:184, or SEQ ID NO:186. The P450-3 polypeptide can catalyze conversion of GA₄ to GA₁ or GA₇ to GA₃. See FIGS. 3 and 5.

[0248] In some embodiments, a host comprises a gene encoding a GA₄ desaturase (DES) polypeptide. The DES polypeptide can be a fungus-derived DES polypeptide. In some embodiments, the DES polypeptide comprises a DES polypeptide having the amino acid sequence set forth in SEQ ID NO:20, SEQ ID NO:22, SEQ ID NO:24, or SEQ ID NO:26. In some aspects, the DES polypeptide of SEQ ID NO:22 and/or the DES polypeptide of SEQ ID NO:26 comprises an L233P substitution. The DES polypeptide is a 2-ODD polypeptide and can catalyze conversion of GA₄ to GA₇. See FIGS. 3 and 5.

[0249] In some embodiments, a host comprises a gene encoding a cytochrome B5 polypeptide and/or a gene encoding a cytochrome B5 reductase polypeptide. In some aspects, a cytochrome B5 reductase provides electrons to a P450 monooxygenase through cytochrome B5. In some aspects, the cytochrome B5 electron transport system assists a cytochrome P450 reductase by supplying an electron of the catalytic cycle or by acting as an allosteric activator. See, e.g., Troncoso et al., 2008, Phytochemistry 69(3):672-83. In some embodiments, the cytochrome B5 polypeptide comprises a cytochrome B5 polypeptide having the amino acid sequence set forth in SEQ ID NO:160. In some embodiments, the cytochrome B5 reductase polypeptide comprises a cytochrome B5 polypeptide having the amino acid sequence set forth in SEQ ID NO:2. See Example 2.

[0250] In some embodiments, a host comprises a CYP112 polypeptide. In some embodiments, the CYP112 polypeptide comprises a CYP112 polypeptide having the amino acid sequence set forth in SEQ ID NO:4, SEQ ID NO:6, SEQ ID NO:8, SEQ ID NO:10, SEQ ID NO:124, or SEQ ID NO:128. The CYP112 polypeptide can catalyze conversion of GA₁₂ to GA₁₅, GA₁₅ to GA₂₄, GA₂₄ to GA₉, and GA₁₄ to GA₄. See FIGS. 10 and 12.

[0251] In some embodiments, a host comprises one or more heterologous genes encoding one or more alcohol dehydrogenase (ADH) polypeptides. The ADH polypeptide can be an ADH polypeptide having the amino acid sequence set forth in SEQ ID NO:112, SEQ ID NO:116, or SEQ ID NO:118. See FIG. 10. In some aspects, the ADH polypeptide converts GA₁₂ aldehyde or GA₁₄ aldehyde to GA₁₂ or GA₁₄, respectively. In some aspects, the ADH polypeptide converts kaurenal to kaurenoic acid.

[0252] In some embodiments, a host comprising CDPS-KS bifunctional polypeptides can be comparatively tested in a host inserted with CytB5-1 and CytB5red-1. The host may then be transformed with CPR12 (SEQ ID NO:167 which encodes SEQ ID NO:168), RsKO_GA (SEQ ID NO:169 which encodes SEQ ID NO:170), GGPPS7 (SEQ ID NO:176 and SEQ ID NO:178), KO1 (SEQ ID NO:171 which encodes SEQ ID NO:172), and either CDPS-KS6+KS5 (SEQ ID NO:101 which encodes SEQ ID NO:102; and SEQ ID NO:181 which encodes SEQ ID NO:182), CDPS-KS6 (SEQ ID NO:101 which encodes SEQ ID NO:102), CDPS-KS4 (SEQ ID NO:226 which encodes SEQ ID NO:227), or CDPS-KS9 (SEQ ID NO 228 which encodes SEQ ID NO:229). See Example 3 and Table 6. In some aspects, the CDPS-KS activity converts GGPPS to kaurenoic acid.

[0253] In some embodiments, a host may comprise KO1 (SEQ ID NO:171 (nt) and SEQ ID NO:172 (aa) and CPR19 (SEQ ID NO:193 (nt) and SEQ ID NO:194 (aa)) and may be transformed with CDPS-KS6 (SEQ ID NO:101), KS5 (SEQ ID NO:181), GGPPS7 (SEQ ID NO:177), KO1 (SEQ ID NO:171), KAO and CPR genes using USER™ based DNA assembler vectors and NatMx marker. The host may co-express KAO-3/CPR19 polypeptides (SEQ ID NO:230 and SEQ ID NO:193), KAO-4/CPR17 (SEQ ID NO:73 and SEQ ID NO:187) or CPR19 (SEQ ID NO:193) polypeptides, or KAO-5/CPR12 (SEQ ID NO:61 and SEQ ID NO:167) or CPR19 polypeptides (for example, SEQ ID NO:193). See Example 4, FIG. 7, and Table 7. In some aspects, the KAO polypeptide converts GA₁₂ aldehyde or GA₁₄ aldehyde to GA₁₂ or GA₁₄, respectively.

[0254] In some embodiments, a host may comprise FfCytB5-1 (SEQ ID NO:159 (nt) and SEQ ID NO:160 (aa)), FfCytB5red-1 (SEQ ID NO:01 (nt) and SEQ ID NO:02 (aa)), CPR19 (SEQ ID NO:193 (nt) and SEQ ID NO:194 (aa)), RsKO-GA (SEQ ID NO:169 (nt) and SEQ ID NO:170 (aa)), KS5 (SEQ ID NO:181 (nt) and SEQ ID NO:182 (aa)), tCDPS5 (SEQ ID NO:179 (nt) and SEQ ID NO:180 (aa)), GGPPS-7 (SEQ ID NO:177 (nt) and SEQ ID NO:178 (aa)), and KO1 (SEQ ID NO:171 (nt) and SEQ ID NO:172 (aa)) and be transformed with P450-3-1 (SEQ ID NO:45), P450-2-4 (SEQ ID NO:141), P450-3-4 (SEQ ID NO:185), DES-1 (SEQ ID NO:25), and either KAO1 (SEQ ID NO:89), KAO3 (SEQ ID NO:145), KAO4 (SEQ ID NO:73) or KAO5 (SEQ ID NO:61). See Example 4, FIG. 7, and Table 8. In some aspects, the KAO activity leads to the production of GA₁, GA₃, GA₄, GA₇, and epoxide GA₃.

[0255] In some embodiments, a host may be inserted with P450-3-4 (SEQ ID NO:141(nt) and SEQ ID NO:142 (aa)), KO1 (SEQ ID NO:170 (nt) and SEQ ID NO:171 (aa)), GGPPS-7 (SEQ ID NO:177 (nt) and SEQ ID NO:178 (aa)), CDPS-KS6 (SEQ ID NO:101 (nt) and SEQ ID NO:102 (aa)), KAO4 (SEQ ID NO:73 (nt) and SEQ ID NO:74 (aa)), FfCytB5-1 (SEQ ID NO:159 (nt) and SEQ ID NO:160 (aa)), CPR1 (SEQ ID NO:165 (nt) and SEQ ID NO:166 (aa)), CPR19 (SEQ ID NO:193 (nt) and SEQ ID NO:194 (aa)), and various P450-2 genes: P450-2-1 (SEQ ID NO:79 (nt) and SEQ ID NO:80 (aa)), P450-2-8 (SEQ ID NO:232 (nt) and SEQ ID NO:233 (aa)), P450-2-9 (SEQ ID NO:234 (nt) and SEQ ID NO:235 (aa)), and P450-2-10 (SEQ ID NO:236 (nt) and SEQ ID NO:237 (aa)). See Example 5, Table 9, and FIG. 3. In some aspects, the P450-2 activity can convert GA₁₄ to GA₄.

[0256] In some embodiments, P450-2 genes may be introduced by integration into a host using a USER™ cloning based vector system using the URA3 selection marker. P450-2 genes integrated may be selected from SEQ ID NO:13, SEQ ID NO:17, SEQ ID NO:80, and SEQ ID NO:141. See Example 5, Table 10, and FIG. 3. In some aspects, the P450-2 activity can convert GA₁₄ to GA₄.

[0257] In some embodiments, an S. cerevisiae strain (strain “N”) comprising a gene encoding a truncated CDPS polypeptide (SEQ ID NO:179, SEQ ID NO:180), a gene encoding a KS polypeptide (SEQ ID NO:181, SEQ ID NO:182), a first gene encoding a KO polypeptide (SEQ ID NO:171, SEQ ID NO:172), a second gene encoding a KO polypeptide (SEQ ID NO:169, SEQ ID NO:170), a gene encoding a CPR polypeptide (SEQ ID NO:167, SEQ ID NO:168), a gene encoding an ERG20-GGPPS7 polypeptide (SEQ ID NO:195, SEQ ID NO:196), a gene encoding a Gibberellin fujikuroi P450-2-1 polypeptide (SEQ ID NO:79, SEQ ID NO:80), a gene encoding a Gibberellin fujikuroi P450-3-4 polypeptide (SEQ ID NO:185, SEQ ID NO:186), a gene encoding an S. manihoticola KAO4 polypeptide (SEQ ID NO:73, SEQ ID NO:74), a gene encoding a G. fujikuroi DES-1 polypeptide (SEQ ID NO:25, SEQ ID NO:26), a gene encoding a G. fujikuroi cytochrome B5 polypeptide (SEQ ID NO:159, SEQ ID NO:160), and a gene encoding a G. fujikuroi cytochrome B5 reductase polypeptide (SEQ ID NO:1, SEQ ID NO:2) accumulate gibberellins, including, but not limited to, GA₃, GA₄, GA₁₂, GA₁₄, and GA₁₇. See Example 2; Tables 2 and 4; and FIGS. 3 and 4A.

[0258] In some embodiments, an S. cerevisiae strain (strain “A”) comprising a gene encoding a truncated CDPS polypeptide (SEQ ID NO:179, SEQ ID NO:180), a gene encoding a KS polypeptide (SEQ ID NO:181, SEQ ID NO:182), a first gene encoding a KO polypeptide (SEQ ID NO:171, SEQ ID NO:172), a second gene encoding a KO polypeptide (SEQ ID NO:169, SEQ ID NO:170), a gene encoding a CPR polypeptide (SEQ ID NO:167, SEQ ID NO:168), a gene encoding an ERG20-GGPPS7 polypeptide (SEQ ID NO:195, SEQ ID NO:196), a gene encoding a Gibberellin fujikuroi P450-2-1 polypeptide (SEQ ID NO:79, SEQ ID NO:80), a gene encoding a Gibberellin fujikuroi P450-3-4 polypeptide (SEQ ID NO:185, SEQ ID NO:186), a gene encoding an S. manihoticola KAO4 polypeptide (SEQ ID NO:73, SEQ ID NO:74), a gene encoding a G. fujikuroi DES-1 polypeptide (SEQ ID NO:25, SEQ ID NO:26), and a gene encoding an A. niger CPR12 polypeptide (SEQ ID NO:157, SEQ ID NO:158) accumulates gibberellins, including, but not limited to, GA₃, GA₄, GA₁₂, GA₁₃, GA₁₄, GA₂₅. See Example 2; Tables 3 and 4; and FIGS. 3 and 4B.

[0259] In some embodiments, expression of ORF1 (SEQ ID NO:153, SEQ ID NO:154), ORF2 (SEQ ID NO:155, SEQ ID NO:156), AIdDH (SEQ ID NO:201, SEQ ID NO:202), ADH (SEQ ID NO:109, SEQ ID NO:110), ANK (SEQ ID NO:210, SEQ ID NO:225) and/or smt (SEQ ID NO:222, SEQ ID NO:209), which are clustered with various gibberellin pathway genes in G. fujikuroi, can improve turnover of gibberellin-producing S. cerevisiae strains described herein. See e.g., Bömke et al., 2009, Phytochemistry, 70(15-16):1876-93.

[0260] In some embodiments, an S. cerevisiae strain (strain “F”) comprising a gene encoding a truncated CDPS polypeptide (SEQ ID NO:179, SEQ ID NO:180), a gene encoding a KS polypeptide (SEQ ID NO:181, SEQ ID NO:182), a first gene encoding a KO polypeptide (SEQ ID NO:171, SEQ ID NO:172), a second gene encoding a KO polypeptide (SEQ ID NO:169, SEQ ID NO:170), a gene encoding a CPR polypeptide (SEQ ID NO:167, SEQ ID NO:168), a gene encoding an ERG20-GGPPS7 polypeptide (SEQ ID NO:195, SEQ ID NO:196), a gene encoding an A. thaliana GA₂₀ₒₓ₋₄ polypeptide (SEQ ID NO:39, SEQ ID NO:40), a gene encoding a G. fujikuroi P450-3-4 polypeptide (SEQ ID NO:185, SEQ ID NO:186), a gene encoding an S. manihoticola KAO4 polypeptide (SEQ ID NO:73, SEQ ID NO:74), a gene encoding a G. fujikuroi DES-1 polypeptide (SEQ ID NO:25, SEQ ID NO:26), and a gene encoding an A. niger CPR16 polypeptide (SEQ ID NO:157, SEQ ID NO:158) accumulates gibberellins, including, but not limited to, GA₃, GA₄, GA₁₂, and GA₁₄. See Example 2, FIGS. 4A and 5, and Table 4.

[0261] In some embodiments, an S. cerevisiae strain comprising a gene encoding a truncated CDPS polypeptide (SEQ ID NO:179, SEQ ID NO:180), a gene encoding a KS polypeptide (SEQ ID NO:181, SEQ ID NO:182), a first gene encoding a KO polypeptide (SEQ ID NO:171, SEQ ID NO:172), a second gene encoding a KO polypeptide (SEQ ID NO:169, SEQ ID NO:170), a gene encoding a CPR polypeptide (SEQ ID NO:167, SEQ ID NO:168), a gene encoding an ERG20-GGPPS7 polypeptide (SEQ ID NO:195, SEQ ID NO:196), a gene encoding a C. maxima GA₂₀ₒₓ₋₁ polypeptide (SEQ ID NO:39, SEQ ID NO:40), a gene encoding a G. fujikuroi P450-3-4 polypeptide (SEQ ID NO:185, SEQ ID NO:186), a gene encoding a G. fujikuroi DES-1 polypeptide (SEQ ID NO:25, SEQ ID NO:26), and a gene encoding an A. niger CPR16 polypeptide (SEQ ID NO:157, SEQ ID NO:158) accumulates gibberellins. See FIG. 5.

[0262] In some embodiments, expression of a gene encoding a KAO polypeptide (such as, but not limited to, a KAO11 polypeptide having the amino acid sequence SEQ ID NO:64) in an ent-kaurenoic acid-producing S. cerevisiae strain that further coexpresses C. maxima GA₂₀ₒₓ (SEQ ID NO:39, SEQ ID NO:40) and Oryza sativa GA₁₃ₒₓ (SEQ ID NO:97, SEQ ID NO:98) results in accumulation of GA₉ and GA₂₀. See FIGS. 9A and 9B. In some aspects, further expression of a gene encoding a GA₃ₒₓ polypeptide (SEQ ID NO:27, SEQ ID NO:28, SEQ ID NO:29, SEQ ID NO:30, SEQ ID NO:41, SEQ ID NO:42, SEQ ID NO:43, SEQ ID NO:44), a gene encoding a P450-3 polypeptide (SEQ ID NO:183, SEQ ID NO:184, SEQ ID NO:185, SEQ ID NO:186), and a gene encoding a DES polypeptide (SEQ ID NO:25, SEQ ID NO:26, SEQ ID NO:21, SEQ ID NO:22, SEQ ID NO:19, SEQ ID NO:20) results in accumulation of GA₁₂, GA₇, GA₄, GA₂₅, GA₂₄, and GA₁₃.

[0263] In some embodiments, an S. cerevisiae strain (strain “P”) comprising a gene encoding a truncated CDPS polypeptide (SEQ ID NO:179, SEQ ID NO:180), a gene encoding a KS polypeptide (SEQ ID NO:181, SEQ ID NO:182), a first gene encoding a KO polypeptide (SEQ ID NO:171, SEQ ID NO:172), a second gene encoding a KO polypeptide (SEQ ID NO:169, SEQ ID NO:170), a gene encoding a CPR polypeptide (SEQ ID NO:167, SEQ ID NO:168), a gene encoding an ERG20-GGPPS7 polypeptide (SEQ ID NO:195, SEQ ID NO:196), a gene encoding a P. sativum KAO11 polypeptide (SEQ ID NO:63, SEQ ID NO:64), a gene encoding a C. maxima GA₇ₒₓ polypeptide (SEQ ID NO:151, SEQ ID NO:152), a gene encoding a B. diazoefficiens ADH polypeptide (SEQ ID NO:115, SEQ ID NO:116), a gene encoding a B. diazoefficiens CYP112 polypeptide (SEQ ID NO:123, SEQ ID NO:124), a gene encoding a P. putida ferredoxin polypeptide (SEQ ID NO:147, SEQ ID NO:148), and a gene encoding a P. putida ferredoxin reductase polypeptide (SEQ ID NO:149, SEQ ID NO:150) accumulates GA₉. See Example 7, FIGS. 10 and 11, and Table 12. In some embodiments, a ferredoxin reductase polypeptide or a cytochrome P450 reductase reduce CYP112.

[0264] In some embodiments, an S. cerevisiae strain (strain “U”) comprising a gene encoding a truncated CDPS polypeptide (SEQ ID NO:179, SEQ ID NO:180), a gene encoding a KS polypeptide (SEQ ID NO:181, SEQ ID NO:182), a first gene encoding a KO polypeptide (SEQ ID NO:171, SEQ ID NO:172), a second gene encoding a KO polypeptide (SEQ ID NO:169, SEQ ID NO:170), a gene encoding a CPR polypeptide (SEQ ID NO:167, SEQ ID NO:168), a gene encoding an ERG20-GGPPS7 polypeptide (SEQ ID NO:195, SEQ ID NO:196), a gene encoding an S. manihoticola KAO4 polypeptide (SEQ ID NO:73, SEQ ID NO:74), a gene encoding a KO polypeptide (SEQ ID NO:169, SEQ ID NO:170), a gene encoding a B. diazoefficiens ADH polypeptide (SEQ ID NO:115, SEQ ID NO:116), a gene encoding a B. diazoefficiens CYP112 polypeptide (SEQ ID NO:123, SEQ ID NO:124), a gene encoding a P. putida ferredoxin polypeptide (SEQ ID NO:147, SEQ ID NO:148), and a gene encoding a P. putida ferredoxin reductase polypeptide (SEQ ID NO:149, SEQ ID NO:150) accumulates GA₄. See Example 7, FIGS. 12 and 13, and Table 13.

[0265] In some embodiments, an S. cerevisiae strain comprising a gene encoding a DAP1-2 polypeptide (SEQ ID NO:212, SEQ ID NO:213), a gene encoding a CytB5-2 polypeptide (SEQ ID NO:238, SEQ ID NO:239), a gene encoding a CytB5red-4 polypeptide (SEQ ID NO:240, SEQ ID NO:241), a gene encoding a FfCytB5-1 polypeptide (SEQ ID NO:159, SEQ ID NO:160), a gene encoding a FfCytB5red-1 polypeptide (SEQ ID NO:01, SEQ ID NO:02), a gene encoding an KAO11 polypeptide (SEQ ID NO:63, SEQ ID NO:64), a gene encoding CPR12 polypeptide (SEQ ID NO:167, SEQ ID NO:168), a gene encoding a CDPS-KS6 polypeptide (SEQ ID NO:101, SEQ ID NO:102), a gene encoding a KS5 polypeptide (SEQ ID NO:181, SEQ ID NO:182), a gene encoding a GGPPS-7 polypeptide (SEQ ID NO:177, SEQ ID NO:178), a gene encoding a KO1 polypeptide (SEQ ID NO:171, SEQ ID NO:172), a gene encoding a O. sativa GA₁₃ₒₓ₋₁ polypeptide (SEQ ID NO:97, SEQ ID NO:98) a gene encoding a C. maxima GA₂₀ₒₓ₋₄ polypeptide (SEQ ID NO:39, SEQ ID NO:40), and a gene encoding a M. macrocarpus GA₃ₒₓ₋₁ polypeptide (SEQ ID NO:27, SEQ ID NO:28). The strain produces GA₄ and other gibberellin intermediates. See Example 12, FIG. 16, and Tables 21 and 22.

[0266] In some embodiments, an S. cerevisiae strain comprising a gene encoding a DAP1-2 polypeptide (SEQ ID NO:212, SEQ ID NO:213), a gene encoding an ICE2-2 polypeptide (SEQ ID NO:206, SEQ ID NO:206), a gene encoding a CDPS-KS6 polypeptide (SEQ ID NO:101, SEQ ID NO:102), a gene encoding a KS5 polypeptide (SEQ ID NO:181, SEQ ID NO:182), a gene encoding a FfCytB5-1 polypeptide (SEQ ID NO:159, SEQ ID NO:160) a gene encoding a FfCytB5red-1 polypeptide (SEQ ID NO:01, SEQ ID NO:02), a gene encoding an KAO3 polypeptide (SEQ ID NO:145, SEQ ID NO:146), a gene encoding a CPR19 polypeptide (SEQ ID NO:193, SEQ ID NO:194), a gene encoding CPR12 polypeptide (SEQ ID NO:167, SEQ ID NO:168), a gene encoding a RsKO polypeptide (SEQ ID NO:169, SEQ ID NO:170), a gene encoding a GGPPS-7 polypeptide (SEQ ID NO:177, SEQ ID NO:178), a gene encoding a KO1 polypeptide (SEQ ID NO:171, SEQ ID NO:172), a gene encoding a P450-2-1 polypeptide (SEQ ID NO:79, SEQ ID NO:80) a gene encoding a KAO4 polypeptide (SEQ ID NO:73, SEQ ID NO:74), and a gene encoding a DES-1 polypeptide (SEQ ID NO:25, SEQ ID NO:26). The strain produces GA₃ and other gibberellin intermediates. See Example 11 and Tables 19 and 20.

[0267] In some aspects, a gibberellin-producing host or gibberellin precursor-producing host comprises a damage resistance protein 1 (DAP1) polypeptide. In some embodiments, the DAP1 polypeptide is a DAP1 polypeptide as set forth in GenBank Accession No. YPL170W (SEQ ID NO:223, SEQ ID NO:224). In some aspects, the DAP1 enzyme is a G. fujikuroi DAP1 polypeptide is a polypeptide having the amino acid sequence set forth in SEQ ID NO:215, SEQ ID NO:217, or SEQ ID NO:219 (encoded by a nucleotide sequence set forth in SEQ ID NO:214, SEQ ID NO:216, or SEQ ID NO:217, respectively). In some aspects, expression of a DAP polypeptide increases cytochrome P450 activity.

[0268] In some aspects, a gibberellin-producing host or gibberellin precursor-producing host comprises inheritance of cortical ER protein 2 (ICE2) polypeptide. In some aspects, the ICE2 polypeptide can be a G. fujikuroi ICE2 (SEQ ID NO:205, SEQ ID NO:206). In some aspects, ICE2 is overexpressed.

[0269] In some embodiments, one or more endogenous genes encoding one or more alcohol dehydrogenase polypeptides are disrupted in a host. In some aspects, an alcohol dehydrogenase is knocked out or disrupted individually or in combination with one or more additional alcohol dehydrogenases. In some aspects, disruption of an endogenous alcohol dehydrogenase prevents reduction of aldehyde pathway intermediates to their corresponding alcohols. For example, disruption of one or more alcohol dehydrogeases can prevent reduction of GA₁₂-aldehyde, GA₁₄-aldehyde, kaurenal, GA₂₄, and/or GA₃₆. In some aspects, disruption of an endogenous alcohol dehydrogenase results in an increased accumulation of gibberellins.

[0270] Gibberellin production can be detected and/or analyzed by techniques generally available to one skilled in the art, for example, but not limited to, LC-MS, thin layer chromatography (TLC), high-performance liquid chromatography (HPLC), ultraviolet visible spectroscopy/spectrophotometry (UV-Vis), mass spectrometry (MS), and nuclear magnetic resonance spectroscopy (NMR). In some aspects, GA₃ accumulates at least 100 mg/liter in fed batch fermentation methods.

### Functional Homologs

[0271] Functional homologs of the polypeptides described above are also suitable for use in producing gibberellins in a recombinant host. A functional homolog is a polypeptide that has sequence similarity to a reference polypeptide, and that carries out one or more of the biochemical or physiological function(s) of the reference polypeptide. A functional homolog and the reference polypeptide can be a natural occurring polypeptide, and the sequence similarity can be due to convergent or divergent evolutionary events. As such, functional homologs are sometimes designated in the literature as homologs, or orthologs, or paralogs. Variants of a naturally occurring functional homolog, such as polypeptides encoded by mutants of a wild type coding sequence, can themselves be functional homologs. Functional homologs can also be created via site-directed mutagenesis of the coding sequence for a polypeptide, or by combining domains from the coding sequences for different naturally-occurring polypeptides (“domain swapping”). Techniques for modifying genes encoding functional polypeptides described herein are known and include, inter alia, directed evolution techniques, site-directed mutagenesis techniques and random mutagenesis techniques, and can be useful to increase specific activity of a polypeptide, alter substrate specificity, alter expression levels, alter subcellular location, or modify polypeptide-polypeptide interactions in a desired manner. Such modified polypeptides are considered functional homologs. The term “functional homolog” is sometimes applied to the nucleic acid that encodes a functionally homologous polypeptide.

[0272] Functional homologs can be identified by analysis of nucleotide and polypeptide sequence alignments. For example, performing a query on a database of nucleotide or polypeptide sequences can identify homologs of gibberellin biosynthesis polypeptides. Sequence analysis can involve BLAST, Reciprocal BLAST, or PSI-BLAST analysis of non-redundant databases using a cytochrome P450 monooxygenase, cytochrome P450 reductase, and/or 2-ODD amino acid sequence as the reference sequence. Amino acid sequence is, in some instances, deduced from the nucleotide sequence. Those polypeptides in the database that have greater than 40% sequence identity are candidates for further evaluation for suitability as a gibberellin biosynthesis polypeptide. Amino acid sequence similarity allows for conservative amino acid substitutions, such as substitution of one hydrophobic residue for another or substitution of one polar residue for another. If desired, manual inspection of such candidates can be carried out in order to narrow the number of candidates to be further evaluated. Manual inspection can be performed by selecting those candidates that appear to have domains present in gibberellin biosynthesis polypeptides, e.g., conserved functional domains. In some embodiments, nucleic acids and polypeptides are identified from transcriptome data based on expression levels rather than by using BLAST analysis.

[0273] Conserved regions can be identified by locating a region within the primary amino acid sequence of a gibberellin biosynthesis polypeptide that is a repeated sequence, forms some secondary structure (e.g., helices and beta sheets), establishes positively or negatively charged domains, or represents a protein motif or domain. See, e.g., the Pfam web site describing consensus sequences for a variety of protein motifs and domains on the World Wide Web at sanger.ac.uk/Software/Pfam/ and pfam.janelia.org/. Conserved regions also can be determined by aligning sequences of the same or related polypeptides from closely related species. Closely related species preferably are from the same family. In some embodiments, alignment of sequences from two different species is adequate to identify such homologs.

[0274] Typically, polypeptides that exhibit at least about 40% amino acid sequence identity are useful to identify conserved regions. Conserved regions of related polypeptides exhibit at least 45% amino acid sequence identity (e.g., at least 50%, at least 60%, at least 70%, at least 80%, or at least 90% amino acid sequence identity). In some embodiments, a conserved region exhibits at least 92%, 94%, 96%, 98%, or 99% amino acid sequence identity.

[0275] For example, polypeptides suitable for producing gibberellins in a recombinant host include functional homologs of cytochrome P450 monooxygenase, cytochrome P450 reductase, and/or 2-ODD. Methods to modify the substrate specificity of, for example, cytochrome P450 monooxygenase, cytochrome P450 reductase, and/or 2-ODD, are known to those skilled in the art, and include without limitation site-directed/rational mutagenesis approaches, random directed evolution approaches and combinations in which random mutagenesis/saturation techniques are performed near the active site of the enzyme. For example, see Osmani et al., 2009, Phytochemistry 70: 325-47.

[0276] A candidate sequence typically has a length that is from 80% to 200% of the length of the reference sequence, e.g., 82, 85, 87, 89, 90, 93, 95, 97, 99, 100, 105, 110, 115, 120, 130, 140, 150, 160, 170, 180, 190, or 200% of the length of the reference sequence. A functional homolog polypeptide typically has a length that is from 95% to 105% of the length of the reference sequence, e.g., 90, 93, 95, 97, 99, 100, 105, 110, 115, or 120% of the length of the reference sequence, or any range between. A percent (%) identity for any candidate nucleic acid or polypeptide relative to a reference nucleic acid or polypeptide can be determined as follows. A reference sequence (e.g., a nucleic acid sequence or the amino acid sequence described herein) is aligned to one or more candidate sequences using the computer program ClustalW (version 1.83, default parameters), which allows alignments of nucleic acid or polypeptide sequences to be carried out across their entire length (global alignment).

[0277] ClustalW calculates the best match between a reference and one or more candidate sequences, and aligns them so that identities, similarities and differences can be determined. Gaps of one or more residues can be inserted into a reference sequence, a candidate sequence, or both, to maximize sequence alignments. For fast pairwise alignment of nucleic acid sequences, the following default parameters are used: word size: 2; window size: 4; scoring method: % age; number of top diagonals: 4; and gap penalty: 5. For multiple alignment of nucleic acid sequences, the following parameters are used: gap opening penalty: 10.0; gap extension penalty: 5.0; and weight transitions: yes. For fast pairwise alignment of protein sequences, the following parameters are used: word size: 1; window size: 5; scoring method: % age; number of top diagonals: 5; gap penalty: 3. For multiple alignment of protein sequences, the following parameters are used: weight matrix: blosum; gap opening penalty: 10.0; gap extension penalty: 0.05; hydrophilic gaps: on; hydrophilic residues: Gly, Pro, Ser, Asn, Asp, Gin, Glu, Arg, and Lys; residue-specific gap penalties: on. The ClustalW output is a sequence alignment that reflects the relationship between sequences. ClustalW can be run, for example, at the Baylor College of Medicine Search Launcher site on the World Wide Web (searchlauncher.bcm.tmc.edu/multi-align/multi-align.html) and at the European Bioinformatics Institute site on the World Wide Web (ebi.ac.uk/clustalw).

[0278] To determine percent (%) identity of a candidate nucleic acid or amino acid sequence to a reference sequence, the sequences are aligned using ClustalW, the number of identical matches in the alignment is divided by the length of the reference sequence, and the result is multiplied by 100. It is noted that the % identity value can be rounded to the nearest tenth. For example, 78.11, 78.12, 78.13, and 78.14 are rounded down to 78.1, while 78.15, 78.16, 78.17, 78.18, and 78.19 are rounded up to 78.2.

[0279] The term “% identity” as used herein about amino acid sequences means the degree of identity in percent between two amino acid sequences obtained when using the Needleman-Wunsch algorithm as implemented in the Needle program of the EMBOSS package (EMBOSS: The European Molecular Biology Open Software Suite), preferably version 5.0.0 or later. The parameters used are gap open penalty of 10, gap extension penalty of 0.5, and the EBLOSUM62 (EMBOSS version of BLOSUM62) substitution matrix. The output of Needle labeled “longest identity” (obtained using the −nobrief option) is used as the percent identity and is calculated as follows:

[(identical amino acid residues)/(Length of alignment−total number of gaps in alignment)]×100

[0280] The protein sequences of the present invention can further be used as a “query sequence” to perform a search against sequence databases, for example to identify other family members or related sequences. Such searches can be performed using the BLAST programs. Software for performing BLAST analyses is publicly available through the National Center for Biotechnology Information. BLASTP is used for amino acid sequences and BLASTN for nucleotide sequences. The BLAST program uses as defaults:
[0281] Cost to open gap: default=5 for nucleotides/11 for proteins
[0282] Cost to extend gap: default=2 for nucleotides/1 for proteins
[0283] Penalty for nucleotide mismatch: default=−3
[0284] Reward for nucleotide match: default=1
[0285] Expect value: default=10
[0286] Wordsize: default=11 for nucleotides/28 for megablast/3 for proteins

[0287] Furthermore the degree of local identity between the amino acid sequence query or nucleic acid sequence query and the retrieved homologous sequences is determined by the BLAST program. However only those sequence segments are compared that give a match above a certain threshold. Accordingly the program calculates the identity only for these matching segments. Therefore the identity calculated in this way is referred to as local identity.

[0288] It will be appreciated that functional cytochrome P450, cytochrome P450 monooxygenase, cytochrome P450 reductase, and/or 2-ODD proteins can include additional amino acids that are not involved in the enzymatic activities carried out by the enzymes. In some embodiments, cytochrome P450, cytochrome P450 monooxygenase, cytochrome P450 reductase, and/or 2-ODD proteins are fusion proteins. The terms “chimera,” “fusion polypeptide,” “fusion protein,” “fusion enzyme,” “fusion construct,” “chimeric protein,” “chimeric polypeptide,” “chimeric construct,” and “chimeric enzyme” can be used interchangeably herein to refer to polypeptides engineered through the joining of two or more genes that code for different polypeptides (i.e., a polypeptide operatively-linked to a different polypeptide). For example, a polypeptide encoded by a nucleic acid sequence containing a coding sequence from one nucleic acid molecule and the coding sequence from another nucleic acid molecule in which the coding sequences are in the same reading frame such that when the fusion construct is transcribed and translated in a host cell, the protein is produced containing the two proteins. The two molecules can be adjacent in the construct or separated by a linker polypeptide that contains, 1, 2, 3, or more, but typically fewer than 10, 9, 8, 7, or 6 amino acids. The protein product encoded by a fusion construct is referred to as a fusion polypeptide. A chimeric or fusion protein provided herein can include one or more For example, a non-limiting example of a fusion protein can include a CDPS gene fused to a KS gene to generate a CDPS-KS fusion protein when expressed. In some embodiments, a nucleic acid sequence encoding a cytochrome P450, cytochrome P450 monooxygenase, cytochrome P450 reductase, and/or 2-ODD polypeptide can include a tag sequence that encodes a “tag” designed to facilitate subsequent manipulation (e.g., to facilitate purification or detection), secretion, or localization of the encoded polypeptide. Tag sequences can be inserted in the nucleic acid sequence encoding the polypeptide such that the encoded tag is located at either the carboxyl or amino terminus of the polypeptide. Non-limiting examples of encoded tags include green fluorescent protein (GFP), human influenza hemagglutinin (HA), glutathione S transferase (GST), polyhistidine-tag (HIS tag), and Flag™ tag (Kodak, New Haven, Conn.). Other examples of tags include a chloroplast transit peptide, a mitochondrial transit peptide, an amyloplast peptide, signal peptide, or a secretion tag.

[0289] In some embodiments, a fusion protein is a protein altered by domain swapping. As used herein, the term “domain swapping” is used to describe the process of replacing a domain of a first protein with a domain of a second protein. In some embodiments, the domain of the first protein and the domain of the second protein are functionally identical or functionally similar. In some embodiments, the structure and/or sequence of the domain of the second protein differs from the structure and/or sequence of the domain of the first protein.

[0290] In some embodiments, a protein is a protein altered by circular permutation, which consists in the covalent attachment of the ends of a protein that would be opened elsewhere afterwards. Thus, the order of the sequence is altered without causing changes in the amino acids of the protein. In some embodiments, a targeted circular permutation can be produced, for example but not limited to, by designing a spacer to join the ends of the original protein. Once the spacer has been defined, there are several possibilities to generate permutations through generally accepted molecular biology techniques, for example but not limited to, by producing concatemers by means of PCR and subsequent amplification of specific permutations inside the concatemer or by amplifying discrete fragments of the protein to exchange to join them in a different order. The step of generating permutations can be followed by creating a circular gene by binding the fragment ends and cutting back at random, thus forming collections of permutations from a unique construct. In some embodiments, a polypeptide disclosed herein is altered by circular permutation.

### Gibberellin Biosynthesis Nucleic Acids

[0291] A recombinant gene encoding a polypeptide described herein comprises the coding sequence for that polypeptide, operably linked in sense orientation to one or more regulatory regions suitable for expressing the polypeptide. Because many microorganisms are capable of expressing multiple gene products from a polycistronic mRNA, multiple polypeptides can be expressed under the control of a single regulatory region for those microorganisms, if desired. A coding sequence and a regulatory region are considered to be operably linked when the regulatory region and coding sequence are positioned so that the regulatory region is effective for regulating transcription or translation of the sequence. Typically, the translation initiation site of the translational reading frame of the coding sequence is positioned between one and about fifty nucleotides downstream of the regulatory region for a monocistronic gene.

[0292] In many cases, the coding sequence for a polypeptide described herein is identified in a species other than the recombinant host, i.e., is a heterologous nucleic acid. Thus, if the recombinant host is a microorganism, the coding sequence can be from other prokaryotic or eukaryotic microorganisms, from plants or from animals. In some case, however, the coding sequence is a sequence that is native to the host and is being reintroduced into that organism. A native sequence can often be distinguished from the naturally occurring sequence by the presence of non-natural sequences linked to the exogenous nucleic acid, e.g., non-native regulatory sequences flanking a native sequence in a recombinant nucleic acid construct. In addition, stably transformed exogenous nucleic acids may be introduced at positions other than the position where the native sequence is found or kept extrachromosomally in episomes.

[0293] As used herein, the term “regulatory region” refers to a nucleic acid having nucleotide sequences that influence transcription or translation initiation and rate, and stability and/or mobility of a transcription or translation product. Regulatory regions include, without limitation, promoter sequences, enhancer sequences, response elements, protein recognition sites, inducible elements, protein binding sequences, 5′ and 3′ untranslated regions (UTRs), transcriptional start sites, termination sequences, polyadenylation sequences, introns, and combinations thereof. A regulatory region typically comprises at least a core (basal) promoter. A regulatory region also may include at least one control element, such as an enhancer sequence, an upstream element or an upstream activation region (UAR). A regulatory region is operably linked to a coding sequence by positioning the regulatory region and the coding sequence so that the regulatory region is effective for regulating transcription or translation of the sequence. For example, to operably link a coding sequence and a promoter sequence, the translation initiation site of the translational reading frame of the coding sequence is typically positioned between one and about fifty nucleotides downstream of the promoter. A regulatory region can, however, be positioned as much as about 5,000 nucleotides upstream of the translation initiation site, or about 2,000 nucleotides upstream of the transcription start site.

[0294] The choice of regulatory regions to be included depends upon several factors, including, but not limited to, efficiency, selectability, inducibility, desired expression level, and preferential expression during certain culture stages. It is a routine matter for one of skill in the art to modulate the expression of a coding sequence by appropriately selecting and positioning regulatory regions relative to the coding sequence. It will be understood that more than one regulatory region may be present, e.g., introns, enhancers, upstream activation regions, transcription terminators, and inducible elements.

[0295] One or more genes can be combined in a recombinant nucleic acid construct in “modules” useful for a discrete aspect of gibberellin precursor and/or gibberellin production. Combining a plurality of genes in a module, particularly a polycistronic module, facilitates the use of the module in a variety of species. For example, a gibberellin biosynthesis gene cluster, or a UGT gene cluster, can be combined in a polycistronic module such that, after insertion of a suitable regulatory region, the module can be introduced into a wide variety of species. As another example, a UGT gene cluster can be combined such that each UGT coding sequence is operably linked to a separate regulatory region, to form a UGT module. Such a module can be used in those species for which monocistronic expression is necessary or desirable. In addition to genes useful for gibberellin precursor or gibberellin production, a recombinant construct typically also contains an origin of replication, and one or more selectable markers for maintenance of the construct in appropriate species.

[0296] It will be appreciated that because of the degeneracy of the genetic code, a number of nucleic acids can encode a particular polypeptide; i.e., for many amino acids, there is more than one nucleotide triplet that serves as the codon for the amino acid. Thus, codons in the coding sequence for a given polypeptide can be modified such that optimal expression in a particular host is obtained, using appropriate codon bias tables for that host (e.g., microorganism). As isolated nucleic acids, these modified sequences can exist as purified molecules and can be incorporated into a vector or a virus for use in constructing modules for recombinant nucleic acid constructs.

[0297] In some cases, it is desirable to inhibit one or more functions of an endogenous polypeptide in order to divert metabolic intermediates towards gibberellin precursor or gibberellin biosynthesis. For example, it may be desirable to downregulate synthesis of sterols in a yeast strain in order to further increase gibberellin precursor or gibberellin production, e.g., by downregulating squalene epoxidase. As another example, it may be desirable to inhibit degradative functions of certain endogenous gene products, e.g., glycohydrolases that remove glucose moieties from secondary metabolites or phosphatases as discussed herein. In such cases, a nucleic acid that overexpresses the polypeptide or gene product may be included in a recombinant construct that is transformed into the strain. Alternatively, mutagenesis can be used to generate mutants in genes for which it is desired to increase or enhance function.

### Host Microorganisms

[0298] Recombinant hosts can be used to express polypeptides for the producing gibberellins, including mammalian, insect, plant, and algal cells. A number of prokaryotes and eukaryotes are also suitable for use in constructing the recombinant microorganisms described herein, e.g., gram-negative bacteria, yeast, and fungi. A species and strain selected for use as a gibberellin production strain is first analyzed to determine which production genes are endogenous to the strain and which genes are not present. Genes for which an endogenous counterpart is not present in the strain are advantageously assembled in one or more recombinant constructs, which are then transformed into the strain in order to supply the missing function(s).

[0299] In some embodiments, the bacterial cell comprises Escherichia cells, Lactobacillus cells, Lactococcus cells, Corynebacterium cells, Acetobacter cells, Acinetobacter cells, Pseudomonas cells, or Streptomyces cells.

[0300] In some embodiments, the fungal cell comprises a yeast cell. For example, the yeast cell can be a Saccharomycete. The yeast cell can comprise a cell from Saccharomyces cerevisiae, Schizosaccharomyces pombe, Yarrowia lipolytica, Candida glabrata, Ashbya gossypii, Cyberlindnera jadinii, Pichia pastoris, Kluyveromyces lactis, Hansenula polymorpha, Candida boidinii, Arxula adeninivorans, Xanthophyllomyces dendrorhous, or Candida albicans species. In an embodiment, the yeast cell is a cell from the Saccharomyces cerevisiae species. In another embodiment, the fungal cell of the fungal cell comprises a filamentous fungal cell.

[0301] Typically, the recombinant microorganism is grown in a fermenter at a temperature(s) for a period of time, wherein the temperature and period of time facilitate the production of a gibberellin precursor and/or gibberellin compound. For example, the period of time can be approximately 120 hours. Growth in a fermenter can be performed with agitation. The constructed and genetically engineered microorganisms provided by the invention can be cultivated using conventional fermentation processes, including, inter alia, chemostat, batch, fed-batch cultivations, semi-continuous fermentations such as draw and fill, continuous perfusion fermentation, and continuous perfusion cell culture. Depending on the particular microorganism used in the method, other recombinant genes such as isopentenyl biosynthesis genes and terpene synthase and cyclase genes may also be present and expressed. Levels of substrates and intermediates, e.g., isopentenyl diphosphate, dimethylallyl diphosphate, GGPP, ent-kaurene and ent-kaurenoic acid, can be determined by extracting samples from culture media for analysis according to published methods.

[0302] As used herein “a carbon source” or “carbon sources” can include any molecule that can be metabolized by a recombinant host cell to facilitate growth and/or production of the gibberellins. Examples of suitable carbon sources include, but are not limited to, sucrose (e.g., as found in molasses), fructose, xylose, ethanol, glycerol, glucose, cellulose, starch, cellobiose, maltodextrin, mannitol, other sugars or other glucose-comprising polymer. In embodiments employing yeast as a host, for example, carbons sources such as sucrose, fructose, xylose, ethanol, glycerol, and glucose are suitable. The carbon source can be provided to the host organism throughout the cultivation period or alternatively, the organism can be grown for a period of time in the presence of another energy source, e.g., protein, and then provided with a source of carbon only during the fed-batch phase.

[0303] After the recombinant microorganism has been grown in culture for the period of time, wherein the temperature and period of time facilitate the production of a gibberellin precursor and/or gibberellin compound, the gibberellin precursor and/or gibberellin compound can then be recovered from the culture using various techniques known in the art. In some embodiments, a permeabilizing agent can be added to aid the feedstock entering into the host and product getting out. For example, a crude lysate of the cultured microorganism can be centrifuged to obtain a supernatant. The resulting supernatant can then be applied to a chromatography column, e.g., a C-18 column, and washed with water to remove hydrophilic compounds, followed by elution of the compound(s) of interest with a solvent such as methanol. The compound(s) can then be further purified by preparative HPLC. See for example, WO 2009/140394.

[0304] It will be appreciated that the various genes and modules discussed herein can be present in two or more recombinant hosts rather than a single host. When a plurality of recombinant hosts is used, they can be grown in a mixed culture to accumulate gibberellin precursors and/or gibberellins.

[0305] Alternatively, the two or more hosts each can be grown in a separate culture medium and the product of the first culture medium, e.g., ent-kaurenoic acid, can be introduced into second culture medium to be converted into a subsequent intermediate, or into an end product such as, for example, GA₃. The product produced by the second, or final host is then recovered. It will also be appreciated that in some embodiments, a recombinant host is grown using nutrient sources other than a culture medium and utilizing a system other than a fermenter.

[0306] Exemplary prokaryotic and eukaryotic species are described in more detail below. However, it will be appreciated that other species can be suitable. For example, suitable species can be in a genus such as Agaricus, Bacillus, Candida, Corynebacterium, Eremothecium, Escherichia, Bradyrhizobium, Rhizobium, Fusarium/Gibberella, Kluyveromyces, Laetiporus, Lentinus, Phaffia, Phanerochaete, Pichia, Physcomitrella, Rhodoturula, Saccharomyces, Schizosaccharomyces, Sphaceloma, Xanthophyllomyces or Yarrowia. Exemplary species from such genera include Lentinus tigrinus, Laetiporus sulphureus, Phanerochaete chrysosporium, Pichia pastoris, Cyberlindnera jadinii, Physcomitrella patens, Rhodoturula glutinis, Rhodoturula mucilaginosa, Phaffia rhodozyma, Bradyrhizobium japonicum, Xanthophyllomyces dendrorhous, F. fujikuroi/G. fujikuroi, Candida utilis, Candida glabrata, Candida albicans, and Yarrowia lipolytica.

[0307] In some embodiments, a microorganism can be a prokaryote such as Escherichia bacteria cells, for example, Escherichia coli cells; Lactobacillus bacteria cells; Lactococcus bacteria cells; Corynebacterium bacteria cells; Acetobacter bacteria cells; Acinetobacter bacteria cells; or Pseudomonas bacterial cells.

[0308] In some embodiments, a microorganism can be an Ascomycete such as G. fujikuroi, Kluyveromyces lactis, Schizosaccharomyces pombe, A. niger, Yarrowia lipolytica, Ashbya gossypii, or S. cerevisiae.

[0309] In some embodiments, a microorganism can be an algal cell such as Blakeslea trispora, Dunaliella salina, Haematococcus pluvialis, Chlorella sp., Undaria pinnatifida, Sargassum, Laminaria japonica, Scenedesmus almeriensis species.

[0310] In some embodiments, a microorganism can be a cyanobacterial cell such as Blakeslea trispora, Dunaliella salina, Haematococcus pluvialis, Chlorella sp., Undaria pinnatifida, Sargassum, Laminaria japonica, Scenedesmus almeriensis.

### Saccharomyces spp.

[0311] Saccharomyces is a widely used organism in synthetic biology, and can be used as the recombinant microorganism platform. For example, there are libraries of mutants, plasmids, detailed computer models of metabolism and other information available for S. cerevisiae, allowing for rational design of various modules to enhance product yield. Methods are known for making recombinant microorganisms.

### Aspergillus spp.

[0312] Aspergillus species such as A. oryzae, A. niger and A. sojae are widely used microorganisms in food production and can also be used as the recombinant microorganism platform. Nucleotide sequences are available for genomes of A. nidulans, A. fumigatus, A. oryzae, A. clavatus, A. flavus, A. niger, and A. terreus, allowing rational design and modification of endogenous pathways to enhance flux and increase product yield. Metabolic models have been developed for Aspergillus, as well as transcriptomic studies and proteomics studies. A. niger is cultured for the industrial production of a number of food ingredients such as citric acid and gluconic acid, and thus species such as A. niger are generally suitable for producing gibberellins. E. coli

[0313] E. coli, another widely-used organism in synthetic biology, can also be used as the recombinant microorganism platform. Similar to Saccharomyces, there are libraries of mutants, plasmids, detailed computer models of metabolism and other information available for E. coli, allowing for rational design of various modules to enhance product yield. Methods similar to those described above for Saccharomyces can be used to make recombinant E. coli microorganisms.

### Agaricus, Gibberella, and Phanerochaete spp.

[0314] Agaricus, Gibberella, and Phanerochaete spp. can be useful because they are known to produce large amounts of isoprenoids in culture. Thus, the terpene precursors for producing large amounts of gibberellins are already produced by endogenous genes. Thus, modules comprising recombinant genes for gibberellin biosynthesis polypeptides can be introduced into species from such genera without the necessity of introducing mevalonate or MEP pathway genes.

Arxula adeninivorans (Blastobotrys adeninivorans)

[0315] Arxula adeninivorans is dimorphic yeast (it grows as budding yeast like the baker's yeast up to a temperature of 42° C., above this threshold it grows in a filamentous form) with unusual biochemical characteristics. It can grow on a wide range of substrates and can assimilate nitrate. It has successfully been applied to the generation of strains that can produce natural plastics or the development of a biosensor for estrogens in environmental samples.

Yarrowia lipolytica

[0316] Yarrowia lipolytica is dimorphic yeast (see Arxula adeninivorans) and belongs to the family Hemiascomycetes. The entire genome of Yarrowia lipolytica is known. Yarrowia species is aerobic and considered to be non-pathogenic. Yarrowia is efficient in using hydrophobic substrates (e.g. alkanes, fatty acids, oils) and can grow on sugars. It has a high potential for industrial applications and is an oleaginous microorganism. Yarrowia lipolyptica can accumulate lipid content to approximately 40% of its dry cell weight and is a model organism for lipid accumulation and remobilization. See e.g., Nicaud, 2012, Yeast 29(10):409-18; Beopoulos et al., 2009, Biochimie 91(6):692-6; Bankar et al., 2009, Appl Microbiol Biotechnol. 84(5):847-65.

### Rhodotorula sp.

[0317] Rhodotorula is unicellular, pigmented yeast. The oleaginous red yeast, Rhodotorula glutinis, has been shown to produce lipids and carotenoids from crude glycerol (Saenge et al., 2011, Process Biochemistry 46(1):210-8). Rhodotorula toruloides strains have been shown to be an efficient fed-batch fermentation system for improved biomass and lipid productivity (Li et al., 2007, Enzyme and Microbial Technology 41:312-7).

Rhodosporidium toruloides

[0318] Rhodosporidium toruloides is oleaginous yeast and useful for engineering lipid-production pathways. See, e.g., Zhu et al., 2013, Nature Commun. 3:1112; Ageitos et al., 2011, Applied Microbiology and Biotechnology 90(4):1219-27).

Candida boidinii

[0319] Candida boidinii is methylotrophic yeast (it can grow on methanol). Like other methylotrophic species such as Hansenula polymorpha and Pichia pastoris, it provides an excellent platform for producing heterologous proteins. Yields in a multigram range of a secreted foreign protein have been reported. A computational method, IPRO, recently predicted mutations that experimentally switched the cofactor specificity of Candida boidinii xylose reductase from NADPH to NADH. See, e.g., Mattanovich et al., 2012, Methods Mol Biol. 824:329-58; Khoury et al., 2009, Protein Sci. 18(10):2125-38.

Hansenula polymorpha (Pichia angusta)

[0320] Hansenula polymorpha is methylotrophic yeast (see Candida boidinii). It can furthermore grow on a wide range of other substrates; it is thermo-tolerant and can assimilate nitrate (see also Kluyveromyces lactis). It has been applied to producing hepatitis B vaccines, insulin and interferon alpha-2a for the treatment of hepatitis C, furthermore to a range of technical enzymes. See, e.g., Xu et al., 2014, Virol Sin. 29(6):403-9.

Kluyveromyces lactis

[0321] Kluyveromyces lactis is yeast regularly applied to the production of kefir. It can grow on several sugars, most importantly on lactose which is present in milk and whey. It has successfully been applied among others for producing chymosin (an enzyme that is usually present in the stomach of calves) for producing cheese. Production takes place in fermenters on a 40,000 L scale. See, e.g., van Ooyen et al., 2006, FEMS Yeast Res. 6(3):381-92.

Pichia pastoris

[0322] Pichia pastoris is methylotrophic yeast (see Candida boidinii and Hansenula polymorpha). It provides an efficient platform for producing foreign proteins. Platform elements are available as a kit and it is worldwide used in academia for producing proteins. Strains have been engineered that can produce complex human N-glycan (yeast glycans are similar but not identical to those found in humans). See, e.g., Piirainen et al., 2014, N Biotechnol. 31(6):532-7.

### Physcomitrella spp.

[0323] Physcomitrella mosses, when grown in suspension culture, have characteristics similar to yeast or other fungal cultures. This genera can be used for producing plant secondary metabolites, which can be difficult to produce in other types of cells.

[0324] It can be appreciated that the recombinant host cell disclosed herein can comprise a plant cell, a mammalian cell, an insect cell, a fungal cell, comprising a yeast cell, wherein the yeast cell is a cell from Saccharomyces cerevisiae, Schizosaccharomyces pombe, Yarrowia lipolytica, Candida glabrata, Ashbya gossypii, Cyberlindnera jadinii, Pichia pastoris, Kluyveromyces lactis, Hansenula polymorpha, Candida boidinii, Arxula adeninivorans, Xanthophyllomyces dendrorhous, or Candida albicans species or is a Saccharomycete or is a Saccharomyces cerevisiae cell, an algal cell or a bacterial cell, comprising Escherichia cells, Lactobacillus cells, Lactococcus cells, Cornebacterium cells, Acetobacter cells, Acinetobacter cells, or Pseudomonas cells.

### Plants

[0325] Various plants can be used as recombinant host cells (e.g., plant cells, both monocotyledenous and dicotyledenous). In an embodiment, the plants or host cells used in the methods can be derived from monocots, particularly the members of the taxonomic family known as the Gramineae. This includes all members of the grass family of which the edible varieties are known as cereals. The cereals include a wide variety of species such as wheat (Triticum sps.), rice (Oryza sps.) barley (Hordeum sps.) oats, (Avena sps.) rye (Secale sps.), corn (maize) [Zea sps.) and millet (Pennisettum sps.). In another embodiment, the plants or host cells used can be derived from dicots (e.g., soybean (Glycine spp.)). In order to produce transgenic plants that produce gibberellins, plant cells or tissues derived from them are transformed or integrated with genes coding for various enzymes the result in the production of gibberellins. The transgenic plant cells are cultured in medium containing the appropriate selection agent to identify and select for plant cells which express the heterologous nucleic acid sequence. After plant cells that express the heterologous nucleic acid sequence are selected, whole plants can be regenerated from the selected transgenic plant cells. Techniques for regenerating whole plants from transformed plant cells are generally known in the art.

[0326] Plant cells or tissues can be transformed with expression constructs (i.e., heterologous nucleic acid constructs) using a variety of standard techniques. In some embodiments, the heterologous nucleic acid sequences can be stably integrated into the host cell genome so that the integrated nucleic acid sequences are passed onto successive plant generations. The skilled artisan will recognize that a wide variety of transformation techniques exist in the art. Any technique that is suitable for the target host plant may be employed. For example, the nucleic acid sequences can be introduced in a variety of forms including, but not limited to, as a strand of DNA, in a plasmid, or in an artificial chromosome. The introduction of the constructs into the target plant cells can be accomplished by a variety of techniques, including, but not limited to calcium-phosphate-DNA co-precipitation, electroporation, microinjection, Agrobacterium-mediated transformation, liposome-mediated transformation, protoplast fusion or microprojectile bombardment. When Agrobacterium is used for plant cell transformation, a vector is introduced into the Agrobacterium host for homologous recombination with T-DNA or the Ti- or Ri-plasmid present in the Agrobacterium host. The Ti- or Ri-plasmid containing the T-DNA for recombination may be armed (capable of causing gall formation) or disarmed (incapable of causing gall formation), the latter being permissible, so long as the vir genes are present in the transformed Agrobacterium host. The armed plasmid can give a mixture of normal plant cells and gall. In some embodiments, Agrobacterium can be used as the vehicle for transforming host plant cells. The expression or transcription construct bordered by the T-DNA border region(s) is inserted into a broad host range vector capable of replication in E. coli and Agrobacterium, for example pRK2 or derivatives thereof. Alternatively, one may insert the sequences to be expressed in plant cells into a vector containing separate replication sequences, one of which stabilizes the vector in E. coli, and the other in Agrobacterium. A number of markers have been developed for use with plant cells, such as resistance to chloramphenicol, kanamycin, the aminoglycoside G418, hygromycin, or the like.

[0327] It will be appreciated that the various genes and modules discussed herein can be present in two or more recombinant microorganisms rather than a single microorganism. When a plurality of recombinant microorganisms is used, they can be grown in a mixed culture to produce gibberellin precursors and/or gibberellins. For example, a first microorganism can comprise one or more biosynthesis genes for producing a gibberellin precursor, while a second microorganism comprises gibberellin biosynthesis genes. The product produced by the second, or final microorganism is then recovered. It will also be appreciated that in some embodiments, a recombinant microorganism is grown using nutrient sources other than a culture medium and utilizing a system other than a fermenter.

[0328] Alternatively, the two or more microorganisms each can be grown in a separate culture medium and the product of the first culture medium, e.g., ent-kaurenoic acid, can be introduced into second culture medium to be converted into a subsequent intermediate, or into an end product such as GA₃. The product produced by the second, or final microorganism is then recovered.

### Down Stream Processing

[0329] A number of different methods can be used to isolate and purify the gibberellin precursors and/or gibberellin compounds produced by the methods and host cells disclosed herein. For example, the isolating steps may comprise: (a) contacting the cell culture comprising the gibberellin precursor and/or the gibberellin compound with: (i) one or more adsorbent resins in a packed column in order to bind at least a portion of the gibberellin precursor and/or the gibberellin compound to the resin, thereby isolating the gibberellin precursor and/or the gibberellin compound; or (ii) one or more ion exchange or reversed-phase chromatography columns in order to bind at least a portion of the gibberellin precursor and/or the gibberellin compound in the column, thereby isolating the gibberellin precursor and/or the gibberellin compound; or (b) crystallizing and/or extracting the gibberellin precursor and/or the gibberellin compound from the cell culture, thereby isolating the gibberellin precursor and/or the gibberellin compound; or (c) separating the cell culture into a solid phase and a liquid phase, wherein the liquid phase comprises the gibberellin precursor and/or the gibberellin compound; and (i) contacting the liquid phase with one or more adsorbent resins in order to bind at least a portion of the gibberellin precursor and/or the gibberellin compound to the resin, thereby isolating the gibberellin precursor and/or the gibberellin compound; (ii) contacting the liquid phase with one or more ion exchange or reversed-phase chromatography columns in order to bind at least a portion of the gibberellin precursor and/or the gibberellin compound in the column, thereby isolating the gibberellin precursor and/or the gibberellin compound; or (iii) crystallizing and/or extracting the gibberellin precursor and/or the gibberellin compound from the liquid phase, thereby isolating the gibberellin precursor and/or the gibberellin compound.

[0330] In an embodiment, the isolating step can comprise, separating the solid phase from the liquid phase using a process comprising tangential flow filtration with diafiltration membranes to generate a permeate stream comprising the gibberellin precursor and/or the gibberellin compound, wherein the membranes used in the tangential flow filtration are ultrafiltration or nanofiltration membranes. In an embodiment, the permeate stream is extracted by an organic solvent which phase-separates from the aqueous phase to generate an extracted gibberellin product in the organic solvent

[0331] Optionally the permeate stream containing the gibberellin product could be concentrated by some combination of reverse osmosis, nanofiltration, and evaporation to produce a crystallized gibberellin precursor and/or the gibberellin compound.

[0332] The aqueous gibberellin-containing permeate or the concentrate can be extracted by an organic solvent which phase-separates from the aqueous phase. The pH of the aqueous phase is adjusted to less than 4.0, or less than 3.0, in order to protonate the gibberellin molecules and ensure they partition into the organic phase to a high degree. The solvent extraction could be performed in a counter-current extraction centrifuge such as a Podbelniak extractor, or in a counter-current extraction column such as a Karr or Scheibel column. This yields the gibberellin product in an organic solvent suitable for subsequent purification processing.

[0333] It will be understood that organic solvent extraction can be replaced with a series of process operations which yield a similar organic solution of gibberellins. The series of process operations would include (a) precipitation of gibberellins from the aqueous concentrate produced by addition of acid until pH is less than 4.0 or less than 3.0; (b) filtration and optionally water-washing of the resulting gibberellins-containing solids; and (c) dissolution of the filtered gibberellins-containing solids into an organic solvent suitable for purification processing.

[0334] Optionally the organic extract can be contacted with carbon to adsorb impurities and color bodies. Optionally the carbon contacting can be done by mixing carbon in the organic extract and filtering the carbon out of the resulting suspension, or by feeding the organic extract to a column or filter containing a fixed bed of carbon and collecting a purified effluent stream. The organic extract can be crystallized by concentrating the solution evaporatively. The resulting gibberellins product crystals can be filtered, washed, and dried to yield a high-purity gibberellins product.

[0335] The invention will be further described in the following examples, which do not limit the scope of the invention described in the claims.

### EXAMPLES

[0336] The Examples that follow are illustrative of specific embodiments of the invention, and various uses thereof. They are set forth for explanatory purposes only, and are not to be taken as limiting the invention.

### Example 1. LC-MS Analytical Procedures

[0337] Liquid chromatography-mass spectrometry (LC-MS) analyses were performed on Waters ACQUITY UPLC® (Waters Corporation) with a Waters ACQUITY UPLC® BEH C18 column (2.1×50 mm, 1.7 μm particles, 130 Å pore size) equipped with a pre-column (2.1×5 mm, 1.7 μm particles, 130 Å pore size) coupled to a Waters ACQUITY TQD triple quadropole mass spectrometer with electrospray ionization (ESI) operated in negative ionization mode. Compound separation was achieved using a gradient of the two mobile phases: phase A (water with 0.1% formic acid) and phase B (MeCN with 0.1% formic acid) were separated by increasing from 20% to 50% B between 0.3 to 2.0 minutes, increasing to 100% B at 2.01 minutes and holding 100% B for 0.6 minutes, and re-equilibrating for 0.6 minutes. The flow rate was 0.6 mL/min, and the column temperature was set at 55° C. Gibberellins were monitored using SIM (Single Ion Monitoring) and quantified by comparing against authentic standards.

### Example 2. Engineering of Gibberellin-Producing S. Cerevisiae Strain

[0338] An ent-kaurenoic acid-producing S. cerevisiae strain comprising genes encoding a truncated copalyl diphosphate synthase (CDPS) polypeptide (SEQ ID NO:179 (nt), SEQ ID NO:180 (aa)), a kaurene synthase (KS) polypeptide (SEQ ID NO:181 (nt), SEQ ID NO:182 (aa)), a first KO polypeptide (SEQ ID NO:171 (nt), SEQ ID NO:172 (aa)), a second KO polypeptide (SEQ ID NO:169 (nt), SEQ ID NO:170 (aa)), a CPR polypeptide (SEQ ID NO:167 (nt), SEQ ID NO:168 (aa)), and an ERG20-GGPPS7 polypeptide (SEQ ID NO:195 (nt), SEQ ID NO:196 (aa)) was engineered to accumulate gibberellins. Strains “A,” “N,” and “F” were transformed into this ent-kaurenoic acid-producing strain background; the genes of Table 2 or Table 3 were introduced into the strain using the USER™ based yeast integration vector system. See, e.g., Mikkelsen et al., 2012, Metabolic Engineering 14:104-11. See also, the pathway described in FIG. 3.

TABLE 2
Genes expressed in S. cerevisiae strain “N.”

| | Gene 1 | | Gene 2 |
|---|---|---|---|
| Gene 1 | SEQ ID NOs | Gene 2 | SEQ ID NOs |
| G. fujikuroi | SEQ ID NO: | G. fujikuroi | SEQ ID NO: |
| P450-2-1 | 79 (nt) | P450-3-4 | 185 (nt) |
| | SEQ ID NO: | | SEQ ID NO: |
| | 80 (aa) | | 186 (aa) |
| S. manihoticola | SEQ ID NO: | G. fujikuroi | SEQ ID NO: |
| KAO4 | 73 (nt) | DES-1 | 25 (nt) |
| | SEQ ID NO: | | SEQ ID NO: |
| | 74 (aa) | | 26 (aa) |
| G. fujikuroi | SEQ ID NO: | G. fujikuroi | SEQ ID NO: |
| Cytochrome B5 | 159 (nt) | Cytochrome B5 | 1 (nt) |
| | SEQ ID NO: | reductase | SEQ ID NO: |
| | 160 (aa) | | 2 (aa) |

TABLE 3
Genes expressed in S. cerevisiae strain “A.”

| | Gene 1 | | Gene 2 |
|---|---|---|---|
| Gene 1 | SEQ ID NOs | Gene 2 | SEQ ID NOs |
| G. fujikuroi | SEQ ID NO: | G. fujikuroi | SEQ ID NO: |
| P450-2-1 | 79 (nt) | P450-3-4 | 185 (nt) |
| | SEQ ID NO: | | SEQ ID NO: |
| | 80 (aa) | | 186 (aa) |
| S. manihoticola | SEQ ID NO: | G. fujikuroi | SEQ ID NO: |
| KAO4 | 73 (nt) | DES-1 | 25 (nt) |
| | SEQ ID NO: | | SEQ ID NO: |
| | 74 (aa) | | 26 (aa) |
| A. niger | SEQ ID NO: | | |
| CPR16 | 157 (nt) | | |
| | SEQ ID NO: | | |
| | 158 (aa) | | |

[0339] Furthermore, the ent-kaurenoic acid-producing S. cerevisiae strain described above was also transformed with the genes of Table 4 using the USER™ cloning based yeast integration system to engineer strain “F.” See the pathway described in FIG. 5. As with S. cerevisiae strains comprising a gene encoding a G. fujikuroi P450-2-1 polypeptide (strains “N,” “A,” and “I”), ent-kaurenoic acid-producing S. cerevisiae strains comprising a gene encoding a C. maxima GA₂₀ₒₓ₋₄ polypeptide (SEQ ID NO:39 (nt), SEQ ID NO:40 (aa)) accumulated gibberellins. See FIG. 4A. Thus, S. cerevisiae strains comprising both fungal pathway genes and a plant gene (i.e. GA₂₀ₒₓ) are capable of producing gibberellins such as GA₃.

TABLE 4
Genes expressed in S. cerevisiae strain “F.”

| | Gene 1 | | Gene 2 |
|---|---|---|---|
| Gene 1 | SEQ ID NOs | Gene 2 | SEQ ID NOs |
| C. maxima | SEQ ID NO: | G. fujikuroi | SEQ ID NO: |
| GA₂₀ₒₓ₋₄ | 39 (nt) | P450-3-4 | 185 (nt) |
| | SEQ ID NO: | | SEQ ID NO: |
| | 40 (aa) | | 186 (aa) |
| S. manihoticola | SEQ ID NO: | G. fujikuroi | SEQ ID NO: |
| KAO4 | 73 (nt) | DES-1 | 25 (nt) |
| | SEQ ID NO: | | SEQ ID NO: |
| | 74 (aa) | | 26 (aa) |
| A. niger | SEQ ID NO: | | |
| CPR16 | 157 (nt) | | |
| | SEQ ID NO: | | |
| | 158 (aa) | | |

[0340] Gibberellin accumulation was observed with these recombinant S. cerevisiae strains and was measured using one of two LC-MS methods. In the first method, LC-MS analysis was performed using a Waters ACQUITY I-class UPLC system fitted with a Waters ACQUITY UPLC® BEH shield RP18 column (2.1×50 mm, 1.7 μm particles, 130 Å pore size) equipped with an ACQUITY UPLC® BEH C18 VanGuard pre-column (130 Å, 1.7 μm, 2.1 mm×5 mm) connected to a Waters Xevo SQ Detector 2 single quadrupole mass spectrometer equipped with an electrospray ionization (ESI) source. Compound separation was carried out using mobile phase of eluent B (ACN with 0.1% formic acid) and eluent A (water with 0.1% formic acid) using gradient separation. Quantification of gibberellins was performed by comparing obtained signals with authentic standards. Gibberellin accumulation was detected using single ion reaction (SIR) in negative ionization mode using the traces described in Table 5. In the second method, LC-MS analysis was performed using a Waters ACQUITY I-class UPLC system fitted with a Waters ACQUITY UPLC® BEH shield RP18 column (2.1×50 mm, 1.7 μm particles, 130 Å pore size) equipped with an ACQUITY UPLC® BEH C18 VanGuard pre-column (130 Å, 1.7 μm, 2.1 mm×5 mm) connected to a Waters XEVO® G2-S quadrupole time-of-flight (QTOF) mass spectrometer equipped with an electrospray ionization (ESI) source operated in negative ionization mode. Compound separation was carried out using the gradient of the first LC-MS method. Gibberellin accumulation was detected by investigating extracted ion chromatograms (EICs) corresponding to their theoretical accurate mass.

TABLE 5
LC-MS analytical characterization.

| | | | | Typical |
|---|---|---|---|---|
| | | | | retention |
| Descrip- | Molecular | Monoisotopic | m/z trace | time (t_{R}) |
| tion | formula | mass | (SIR) | [min] |
| GA₃ | C₁₉H₂₂O₆ | [M] 346.1416 | 344.98 ± 0.5 | 1.02 |
| | | [M − H]⁻ 345.1338 | | |
| GA₄ | C₁₉H₂₄O₅ | [M] 332.1545 | 331.16 ± 0.5 | 2.53 |
| | | [M − H]⁻ 331.1545 | | |
| GA₇ | C₁₉H₂₂O₅ | [M] 330.1467 | 329.15 ± 0.5 | 2.47 |
| | | [M − H]⁻ 329.1389 | | |

[0341] As shown in FIG. 4A, gibberellins, including, but not limited to, GA₃, GA₄, GA₁₂, GA₁₄, and GA₁₇, accumulated upon expression of the genes of Table 2 (strain “N”). Surprisingly, gibberellin accumulation for strain “N” was approximately 3-fold higher than that of strain “1,” which is identical to strain “N” except for that it does not comprise G. fujikuroi cytochrome B5 (SEQ ID NO:159 (nt), SEQ ID NO:160 (aa)) or G. fujikuroi cytochrome B5 reductase (SEQ ID NO:01 (nt), SEQ ID NO:02 (aa)). Thus, cytochrome B5 and cytochrome B5 reductase significantly improve gibberellin accumulation and this result was unexpected and novel.

[0342] As shown in FIG. 4B, gibberellins, including, but not limited to, GA₃, GA₄, GA₁₂, GA₁₃, GA₁₄, GA₂₅, accumulated upon expression of the genes of Table 3 (strain “A”) in the ent-kaurenoic acid-producing S. cerevisiae strain. GA₃ accumulated at approximately 2-10 mg/L in the culture medium of strain “A”. These surprising and unexpected results are thereby the first demonstration of biosynthesis of gibberellins in a heterologous host, S. cerevisiae, which is suitable for efficient large scale commercial production of secondary metabolites.

### Example 3. Analysis of Bifunctional CDPS-KS Homologs

[0343] The expression of GGPPS producing genes alone has been shown to cause cell toxicity, therefore, GGPPS was removed by the expression of CDPS and KS genes. CDPS-KS bifunctional genes were constructed to determine the efficiency of each CDPS/KS combination for removing GGPPS by converting GGPPS to kaurenoic acid. CDPS-KS bifunctional fusion genes were comparatively tested in a yeast strain inserted with CytB5-1 and CytB5red-1. The strain was then transformed with CPR12 (SEQ ID NO:167 (nt) and SEQ ID NO:168 (aa)), RsKO_GA (SEQ ID NO:169 (nt) and SEQ ID NO:170 (aa)), GGPPS7 (SEQ ID NO:176 (aa) and SEQ ID NO:178 (aa)), KO1 (SEQ ID NO:171 (nt) and SEQ ID NO:172 (aa)), and either CDPS-KS6+KS5 (SEQ ID NO:101 (nt) and SEQ ID NO:102 (aa), and SEQ ID NO:181 (nt) and SEQ ID NO:182 (aa)), CDPS-KS6 (SEQ ID NO:101 (aa) and SEQ ID NO:102 (nt)), CDPS-KS4 (SEQ ID NO:226 (nt) and SEQ ID NO:227 (aa)), or CDPS-KS9 (SEQ ID NO:228 (nt) and SEQ ID NO:229 (aa)). The expression of the giberellin pathway genes along with CDPS-KS bifunctional genes were tested to determine the production level of kaurenoic acid. Greater levels of production of kaurenoic acid by a bifunctional CDPS-KS gene alone were produced by the expression of the CDPS-KS6 gene (115.14 μM) and this was enhanced by the co-expression of KS5 (CDPS-KS6+KS5) (182.70 μM). The bifunctional CDPS-K4 was less effective in the removal of GGPP as evidenced by the smaller amount of production of kaurenoic acid (8.80 μM) when compared to bifunctional CDPS-KS6 (see Table 6).

TABLE 6
Conversion of GGPPS to Kaurenoic Acid
by bifunctional CDPS-KS homologs.

| | Kaurenoic | |
|---|---|---|
| Bi-Functional CDPS-KS gene | Acid (μM) | Stddev |
| CDPS-KS6 + KS5 | 182.70 | 17.8 |
| CDPS-KS6 | 115.14 | 14.10024 |
| CDPS-KS4 | 8.80 | 2.975735 |

### Example 4. Analysis of KAO Homologs

[0344] The production level of gibberellins and gibberellin metabolites can vary depending on the expression of a KAO gene. To determine the amount of GA₁₂ and GA₁₄ produced by KAO activity, a yeast strain containing KO1 (SEQ ID NO:171 (nt) and SEQ ID NO:172 (aa)) and CPR19 (SEQ ID NO:193 (nt) and SEQ ID NO:194 (aa)) was transformed with CDPS-KS6 (SEQ ID NO:101), KS5 (SEQ ID NO:181), GGPPS7 (SEQ ID NO:177), KO1 (SEQ ID NO:171), KAO and CPR genes using USER™ based DNA assembler vectors and NatMx marker. Transformants were then grown and metabolites were analyzed using LC-MS. Yeast strains co-expressed KAO3/CPR19 genes (SEQ ID NO:230 and SEQ ID NO:193), KAO4/CPR17 (SEQ ID NO:73 and SEQ ID NO:187) or CPR19 (SEQ ID NO:193) genes, or KAO5/CPR12 (SEQ ID NO:61 and SEQ ID NO:167) or CPR19 genes (SEQ ID NO:193). The KAO3 and KAO5 genes used were obtained from Integrated DNA Technologies (IDT), and the KAO4 gene used was obtained from GeneArt™ (Invitrogen). Expression of KAO3 resulted in the production 1205 (AUC) of GA₁₂ and 25055 (AUC) of GA₁₄. Expression of KAO4 resulted in the production 4175 (AUC) GA₁₂ and 127115 (AUC) GA₁₄. Lastly, expression of KAO5 resulted in the production of 1605 (AUC) GA₁₄.

TABLE 7
Production of GA₁₂ and GA₁₄ by KAO homologs.

| KAO homolog gene | GA₁₂ | GA₁₄ |
|---|---|---|
| KAO3 (Fusarium fujikuroi) (IDT) | 1205 | 25055 |
| KAO4 (Spaceloma manihoticola) (GeneArt ™) | 4175 | 127115 |
| KAO5 (Ustilaginoidea virens) (IDT) | | 1605 |

[0345] Additional yeast studies were conducted to determine the production of gibberellins by various codon-optimized versions of KAO. KAO1 and KAO3 were both codon-optimized versions of F. fujikuroi while KAO2 and KAO4 were codon-optimized versions of F. proliferatum and S. manihoticola, respectively. A yeast train containing FfCytB5-1 (SEQ ID NO:159 (nt) and SEQ ID NO:160 (aa)), FfCytB5red-1 (SEQ ID NO:01 (nt) and SEQ ID NO:02 (aa)), CPR19 (SEQ ID NO:193 (nt) and SEQ ID NO:194 (aa)), RsKO-GA (SEQ ID NO:169 (nt) and SEQ ID NO:170 (aa)), KS5 (SEQ ID NO:181 (nt) and SEQ ID NO:182 (aa)), tCDPS5 (SEQ ID NO:179 (nt) and SEQ ID NO:180 (aa)), GGPPS7 (SEQ ID NO:177 (nt) and SEQ ID NO:178 (aa)), and KO1 (SEQ ID NO:171 (nt) and SEQ ID NO:172 (aa)) was transformed with P450-3-1 (SEQ ID NO:45), P450-2-4 (SEQ ID NO:141), P450-3-4 (SEQ ID NO:185), DES-1 (SEQ ID NO:25), and either KAO1 (SEQ ID NO:89), KAO3 (SEQ ID NO:145), KAO4 (SEQ ID NO:73) or KAO5 (SEQ ID NO:61). USER™ based DNA assembler vectors and URA3 markers were used. Transformants were then grown and metabolites were analyzed using LC-MS. Various amounts of metabolites from GA₁₄ and further downstream the gibberellin pathway were produced (see Table 8). All numerical values in Tables 7 and 8 are area under curve (AUC).

TABLE 8
Production of Gibberellins and Gibberellin
Metabolites by KAO homologs

| KAO homolog | | | | | | |
|---|---|---|---|---|---|---|
| gene | GA₁ | GA₁₂ | GA₁₄ | GA₃ | GA₄ | GA₇ |
| KAO1 | 1100 | 19150 | 15745 | 15645 | 5235 | 935 |
| (F. fujikuroi) | | | | | | |
| KAO2 | — | 3175 | 1615 | 1895 | 795 | 995 |
| (F. proliferatum) | | | | | | |
| KAO3 | 1290 | 16385 | 16635 | 14715 | 7050 | 870 |
| (F. fujikuroi) | | | | | | |
| KAO4 | 5065 | 30895 | 43295 | 24305 | 15065 | 2675 |
| (S. manihoticola) | | | | | | |

### Example 5. Analysis of P450-2 Homologs

[0346] Gibberellin acid 14 (GA₁₄) is converted to GA₄ and GA₁ by P450 enzymes. A comparative study of P450-2 homologs was conducted to determine the production level of gibberellins. A yeast strain inserted with P450-3-4 (SEQ ID NO:141 (nt) and SEQ ID NO:142 (aa)), KO1 (SEQ ID NO:170 (nt) and SEQ ID NO:171 (aa)), GGPPS7 (SEQ ID NO:177 (nt) and SEQ ID NO:178 (aa)), CDPS-KS6 (SEQ ID NO:101 (nt) and SEQ ID NO:102 (aa)), KAO4 (SEQ ID NO:73 (nt) and SEQ ID NO:74 (aa)), FfCytB5-1 (SEQ ID NO:159 (nt) and SEQ ID NO:160 (aa)), CPR1 (SEQ ID NO:165 (nt) and SEQ ID NO:166 (aa)), CPR19 (SEQ ID NO:193 (nt) and SEQ ID NO:194 (aa)), and various P450-2 genes. To identify which P450-2 gene was more efficient at the production of GA₁, P450-2-1 (SEQ ID NO:79 (nt) and SEQ ID NO:80 (aa)), P450-2-8 (SEQ ID NO:232 (nt) and SEQ ID NO:233 (aa)), P450-2-9 (SEQ ID NO:234 (nt) and SEQ ID NO:235 (aa)), and P450-2-10 (SEQ ID NO:236 (nt) and SEQ ID NO:237 (aa)) were tested. The combination of genes resulted in the production of GA₁. P450-2-1 produced greater levels of both GA₁ (30309 AUC) and GA₄ (34370 AUC) when compared to the other P450-2 enzymes tested, while P450-2-10 produced a smaller amount of GA₁ (13611 AUC) and P450-2-8 produced a smaller amount of GA₄ (17854 AUC) when compared to the other P450-2 enzymes tested (see Table 9).

TABLE 9
Productionof GA₁ and GA₄ by the
expression of P450-2 homologs.

| P450-2 Homolog | GA₁ | GA₄ |
|---|---|---|
| P450-2-1 F. fujikuroi | 30309 | 34370 |
| P450-2-8 F. fujikuroi | 16472 | 17854 |
| codon optimized (IDT) | | |
| P450-2-9 F. Fujikuroi | 18618 | 30038 |
| P450-2-10 Phaeosphaeria sp. L487 | 13611 | 20440 |

[0347] P450-2 enzymes use GA₁₄ as a substrate to produce GA₄. To determine the production level of GA₄ by P450-2 activity, P450-2 genes were introduced into a GA₁₄ producing strain by integration into the yeast genome using a USER™ cloning based vector system. Each P450 gene was introduced using the URA3 selection marker. P450-2-1 and P450-2-6 (SEQ ID NO:17, SEQ ID NO:18) produced surprising levels of GA₄ that were greater levels of GA₄ (581,138 AUC and 279,002 AUC, respectively) when compared to the other P450-2 enzymes tested, while P450-2-4 produced a smaller amount of GA₄ (3456.88 AUC) (see Table 10). All numerical values in Tables 9 and 10 are area under the curve (AUC).

TABLE 10
Production of GA₄ by
the expression of P450-2 genes.

| P450-2 Homolog | GA₄ |
|---|---|
| Fusarium fujikuroi P450-2-1 | 581,138 |
| Fusarium fujikuroi P450-2-4 | 3,457 |
| Ustilaginoidea virens P450-2-5 | 24,058 |
| Fusarium oxysporum P450-2-6 | 279,002 |

### Example 6. Activity of KAO Genes in GA₁₂-Producing S. Cerevisiae Strains

[0348] Using the USER™ cloning based yeast integration system, the genes in Table 11 were individually introduced into an S. cerevisiae strain that further comprised a gene encoding a G. fujikuroi CPR5 polypeptide (SEQ ID NO:47 (nt), SEQ ID NO:48 (aa)), a gene encoding a CPR12 polypeptide (SEQ ID NO:167 (nt), SEQ ID NO:168 (aa)), a gene encoding an A. thaliana KS5 polypeptide (SEQ ID NO:181 (nt), SEQ ID NO:182 (aa)), a gene encoding a truncated Zea mays CDPS polypeptide (SEQ ID NO:179 (nt), SEQ ID NO:180 (aa)), a gene encoding an ERG20-GGPPS7 polypeptide (SEQ ID NO:220 (nt), SEQ ID NO:221 (aa)), and a gene encoding a Stevia rebaudiana KO1 polypeptide (SEQ ID NO:171 (nt), SEQ ID NO:172 (aa)). See the pathway described in FIG. 7. GA₁₂ was accumulated upon expression of each of the KAO genes of Table 11 as well as C. maxima GA₇ₒₓ₋₁. See FIG. 8.

TABLE 11
KAO genes tested for production of gibberellins.

| KAO | SEQ ID NO |
|---|---|
| A. thaliana KAO5 | SEQ ID NO: 61 (nt) |
| | SEQ ID NO: 62 (aa) |
| A. thaliana KAO6 | SEQ ID NO: 59 (nt) |
| | SEQ ID NO: 60 (aa) |
| H. vulgare KAO9 | SEQ ID NO: 67 (nt) |
| | SEQ ID NO: 68 (aa) |
| P. sativum KAO10 | SEQ ID NO: 57 (nt) |
| | SEQ ID NO: 58 (aa) |
| P. sativum KAO11 | SEQ ID NO: 63 (nt) |
| | SEQ ID NO: 64 (aa) |
| S. manihoticola KAO4 | SEQ ID NO: 73 (nt) |
| | SEQ ID NO: 74 (aa) |

[0349] Co-expression of C. maxima GA₂₀ₒₓ₋₄ (SEQ ID NO:39 (nt), SEQ ID NO:40 (aa)), Oryza sativa GA₁₃ₒₓ (SEQ ID NO:97, SEQ ID NO:98), P. sativum KAO11 (SEQ ID NO:63 (nt), SEQ ID NO:64 (aa)), and C. maxima Ga₇ₒₓ₋₁ (SEQ ID NO:151 (nt), SEQ ID NO:152 (aa)) in the kaurenoic acid-producing S. cerevisiae strain further resulted in accumulation of GA₉ and GA₂₀. See the pathway described in FIG. 9A and graph in FIG. 9B. Additional gibberellins accumulated, including GA₁₂, GA₇, GA₄, GA₂₅, GA₂₄, and GA₁₃, as shown in FIG. 9B.

### Example 7. Activity of CYP117, CYP114, and CYP112 in GA₄- and GA₉-Producing S. Cerevisiae Strains

[0350] Using the USER™ cloning based yeast integration system, the genes in Table 12 or Table 13 were introduced into an S. cerevisiae strain that further comprised a gene encoding a G. fujikuroi CPR5 polypeptide (SEQ ID NO:47 (nt), SEQ ID NO:48 (aa)), a gene encoding a CPR12 polypeptide (SEQ ID NO:167 (nt), SEQ ID NO:168 (aa)), a gene encoding an A. thaliana KS5 polypeptide (SEQ ID NO:181 (nt), SEQ ID NO:182 (aa)), a gene encoding a truncated Z. mays CDPS polypeptide (SEQ ID NO:179 (nt), SEQ ID NO:180 (aa)), a gene encoding an ERG20-GGPPS7 polypeptide (SEQ ID NO:220 (nt), SEQ ID NO:221 (aa)), and a gene encoding a Stevia rebaudiana KO1 polypeptide (SEQ ID NO:171 (nt), SEQ ID NO:172 (aa)). See the pathways described in FIGS. 10 and 12. CYP112 (SEQ ID NO:123 (nt), SEQ ID NO:124 (aa)) was active in the presence of the KO of encoded by the nucleotide sequence set forth in SEQ ID NO:169. GA₉ was accumulated by the S. cerevisiae strain comprising KAO-11 (SEQ ID NO:63 (nt), SEQ ID NO:64 (aa)) and CYP112-KO anchor (SEQ ID NO:123 (nt), SEQ ID NO:124 (aa)). See FIG. 11. GA₄ was accumulated by the S. cerevisiae strain comprising KAO4 (SEQ ID NO:73 (nt), SEQ ID NO:74 (aa)) and the CYP112-KO anchor (SEQ ID NO:123 (nt), SEQ ID NO:124 (aa)). See FIG. 13.

TABLE 12
Genes expressed in S. cerevisiae strain “P.”

| | Gene 1 SEQ | | Gene 2 SEQ |
|---|---|---|---|
| Gene 1 | ID NOs | Gene 2 | ID NOs |
| P. sativum | SEQ ID NO: | C. maxima | SEQ ID NO: |
| KAO11 | 63 (nt) | GA₇ₒₓ | 151 (nt) |
| | SEQ ID NO: | | SEQ ID NO: |
| | 64 (aa) | | 152 (aa) |
| B. diazoefficiens | SEQ ID NO: | B. diazoefficiens | SEQ ID NO: |
| ADH | 115 (nt) | CYP112 | 123 (nt) |
| | SEQ ID NO: | | SEQ ID NO: |
| | 116 (aa) | | 124 (aa) |
| P. putida | SEQ ID NO: | P. putida | SEQ ID NO: |
| ferredoxin | 147 (nt) | ferredoxin | 149 (nt) |
| | SEQ ID NO: | reductase | SEQ ID NO: |
| | 148 (aa) | | 150 (aa) |

TABLE 13
Genes expressed in S. cerevisiae strain “U.”

| | Gene 1 SEQ | | Gene 2 SEQ |
|---|---|---|---|
| Gene 1 | ID NOs | Gene 2 | ID NOs |
| S. manihoticola | SEQ ID NO: | KO | SEQ ID NO: |
| KAO4 | 73 (nt) | | 169 (nt) |
| | SEQ ID NO: | | SEQ ID NO: |
| | 74 (aa) | | 170 (aa) |
| B. diazoefficiens | SEQ ID NO: | B. diazoefficiens | SEQ ID NO: |
| ADH | 115 (nt) | CYP112 | 123 (nt) |
| | SEQ ID NO: | | SEQ ID NO: |
| | 116 (aa) | | 124 (aa) |
| P. putida | SEQ ID NO: | P. putida | SEQ ID NO: |
| ferredoxin | 147 (nt) | ferredoxin | 149 (nt) |
| | SEQ ID NO: | reductase | SEQ ID NO: |
| | 148 (aa) | | 150 (aa) |

### Example 8. Expression of P450-1 Genes for Production of GA₁₄

[0351] An S. cerevisiae strain comprising a gene encoding a P450-1 polypeptide (SEQ ID NO:87 (nt), SEQ ID NO:88 (aa)) or a P450-1 polypeptide (SEQ ID NO:145 (nt), SEQ ID NO:146 (aa)), a KAO4 polypeptide (SEQ ID NO:73 (nt), SEQ ID NO:74 (aa)), or a KAO1 polypeptide (SEQ ID NO:89 (nt), SEQ ID NO:90 (aa)) was engineered to accumulate kaurenoic acid, as described in Example 2. Using the USER™ based yeast integration vector system, S. manihoticola KAO4 polypeptide (SEQ ID NO:73 (nt), SEQ ID NO:74 (aa)) or G. fujikuroi KAO1 polypeptide (SEQ ID NO:89 (nt), SEQ ID NO:90 (aa)) individually introduced into the S. cerevisiae strain. As shown in FIGS. 14A and 14B, greater levels of kaurenoic were converted to GA₁₄ in the strain comprising KAO4 (SEQ ID NO:73, SEQ ID NO:74 (aa)), as compared to the strain comprising KAO1 (SEQ ID NO:89 (nt), SEQ ID NO:90 (aa)).

### Example 9. Engineering of S. Cerevisiae Strain Comprising Cytochrome B5 and Cytochrome B5 Reductase with CPR14, CPR15, or CPR16

[0352] Using the USER™ based yeast integration vector system, the genes in Table 14, Table 15, or Table 16 were introduced into an S. cerevisiae strain that further comprised a gene encoding a truncated CDPS polypeptide (SEQ ID NO:179 (nt), SEQ ID NO:180 (aa)), a KS polypeptide (SEQ ID NO:181 (nt), SEQ ID NO:182 (aa)), a KO polypeptide (SEQ ID NO:171 (nt), SEQ ID NO:172 (aa)), a CPR polypeptide (SEQ ID NO:167 (nt), SEQ ID NO:168 (aa)), and an ERG20-GGPPS7 polypeptide (SEQ ID NO:195 (nt), SEQ ID NO:196 (aa)). The strains described in Tables 14-16 were identical, except that they comprised either CPR14, CPR15, or CPR16.

TABLE 14
Genes expressed in S. cerevisiae strain “CPR16.”

| | Gene 1 SEQ | | Gene 2 SEQ |
|---|---|---|---|
| Gene 1 | ID NOs | Gene 2 | ID NOs |
| G. fujikuroi | SEQ ID NO: | G. fujikuroi | SEQ ID NO: |
| P450-2-1 | 79 (nt) | P450-3-4 | 185 (nt) |
| | SEQ ID NO: | | SEQ ID NO: |
| | 80 (aa) | | 186 (aa) |
| A. niger | SEQ ID NO: | G. fujikuroi | SEQ ID NO: |
| CPR16 | 157 (nt) | DES-1 | 25 (nt) |
| | SEQ ID NO: | | SEQ ID NO: |
| | 158 (aa) | | 26 (aa) |
| G. fujikuroi | SEQ ID NO: | G. fujikuroi | SEQ ID NO: |
| Cytochrome B5 | 159 (nt) | Cytochrome B5 | 01 (nt) |
| | SEQ ID NO: | reductase | SEQ ID NO: |
| | 160 (aa) | | 02 (aa) |

TABLE 15
Genes expressed in S. cerevisiae strain “CPR14.”

| | Gene 1 SEQ | | Gene 2 SEQ |
|---|---|---|---|
| Gene 1 | ID NOs | Gene 2 | ID NOs |
| G. fujikuroi | SEQ ID NO: | G. fujikuroi | SEQ ID NO: |
| P450-2-1 | 79 (nt) | P450-3-4 | 185 (nt) |
| | SEQ ID NO: | | SEQ ID NO: |
| | 80 (aa) | | 186 (aa) |
| Phaeosphaeria sp. | SEQ ID NO: | G. fujikuroi | SEQ ID NO: |
| CPR14 | 99 (nt) | DES-1 | 25 (nt) |
| | SEQ ID NO: | | SEQ ID NO: |
| | 100 (aa) | | 26 (aa) |
| G. fujikuroi | SEQ ID NO: | G. fujikuroi | SEQ ID NO: |
| Cytochrome B5 | 159 (nt) | Cytochrome B5 | 01 (nt) |
| | SEQ ID NO: | reductase | SEQ ID NO: |
| | 160 (aa) | | 02 (aa) |

TABLE 16
Genes expressed in S. cerevisiae strain “CPR15.”

| | Gene 1 SEQ | | Gene 2 SEQ |
|---|---|---|---|
| Gene 1 | ID NOs | Gene 2 | ID NOs |
| G. fujikuroi | SEQ ID NO: | G. fujikuroi | SEQ ID NO: |
| P450-2-1 | 79 (nt) | P450-3-4 | 185 (nt) |
| | SEQ ID NO: | | SEQ ID NO: |
| | 80 (aa) | | 186 (aa) |
| Candida | SEQ ID NO: | G. fujikuroi | SEQ ID NO: |
| apicola | 139 (nt) | DES-1 | 25 (nt) |
| CPR15 | SEQ ID NO: | | SEQ ID NO: |
| | 140 (aa) | | 26 (aa) |
| G. fujikuroi | SEQ ID NO: | G. fujikuroi | SEQ ID NO: |
| Cytochrome | 159 (nt) | Cytochrome | 01 (nt) |
| B5 | SEQ ID NO: | B5 reductase | SEQ ID NO: |
| | 160 (aa) | | 02 (aa) |

[0353] As shown in FIG. 15, each of the strains accumulated gibberellins, including, but not limited to, GA₃, GA₄, GA₇, GA₁₂, and GA₁₄ (see also, FIG. 4B). Thus, expression of G. fujikuroi cytochrome B5 and G. fujikuroi cytochrome B5 reductase boosts production of gibberellins.

### Example 10. Engineering of S. Cerevisiae Strain for Production of Gibberellin A4 (GA₄)

[0354] Using the USER™ based yeast integration vector system, the genes in Table 17 were stably integrated into an S. cerevisiae strain. The strain was grown in a 2 L Sartorius fermentor using a fed batch process. Temperature, pH, agitation, and aeration rate were controlled throughout the cultivation. The temperature was maintained at 30° C. Air was used for sparging the bioreactor at 1 vvm (L gas/(L liquid×min)). pH was controlled at pH 5.0 by automatic addition of NH₄OH. An 8% NH₄OH solution was used for the first 45 hours of the process; a 16% solution was used for the final part. The stirrer speed was initially set to 800 rpm and increased to up to 1600 rpm during the process. The basis for the medium used for the batch phase is 0.5 L minimal medium containing glucose, salts, vitamins and trace metals. The feed solution was either a high density glucose solution with salts, trace metals and vitamins (glucose feed) or 96% ethanol (ethanol feed). Antifoam was included in the batch medium and feed medium. The fermentation was inoculated using a seed train in shake flasks grown at 30° C. using a minimal medium with similar content as the medium used for the batch phase in the fermentation. The batch fermentation lasted for 16 hours. During the carbon-limited fed batch phase, feed was added following an exponential feed profile feeding with glucose feed from 16-70 hours and ethanol feed from 70-160 hours. Since the ethanol feed only contained the carbon source, concentrated feed components (salts, vitamins, trace metals and antifoam) were combined, sterile filtered and added to the fermentation broth once or twice per day during feeding with ethanol feed.

TABLE 17
Genes integrated in S. cerevisiae strain
for production of gibberellin A4 (GA₄).

| Gene | SEQ ID NOs |
|---|---|
| DAP1-2 | SEQ ID NO: 212 (nt) |
| F. fujikuroi | SEQ ID NO: 213 (aa) |
| ICE2-2 | SEQ ID NO: 205 (nt) |
| F. fujikuroi | SEQ ID NO: 206 (aa) |
| CDPS-K56 | SEQ ID NO: 101 (nt) |
| F. fujikuroi | SEQ ID NO: 102 (aa) |
| KS5 | SEQ ID NO: 181 (nt) |
| A. thaliana | SEQ ID NO: 182 (aa) |
| FfCytB5-1 | SEQ ID NO: 159 (nt) |
| (codon optimized) | SEQ ID NO: 160 (aa) |
| F. fujikuroi | |
| KAO3 | SEQ ID NO: 145 (nt) |
| G. fujikuroi | SEQ ID NO: 146 (aa) |
| CPR19 | SEQ ID NO: 193 (nt) |
| G. fujikuroi | SEQ ID NO: 194 (aa) |
| CPR12 | SEQ ID NO: 167 (nt) |
| R. suavissimus | SEQ ID NO: 168 (aa) |
| RsKO | SEQ ID NO: 169 (nt) |
| R. suavissimus | SEQ ID NO: 170 (aa) |
| GGPPS-7 | SEQ ID NO: 177 (nt) |
| Synecococcus sp. | SEQ ID NO: 178 (aa) |
| KO1 | SEQ ID NO: 171 (nt) |
| S. rebaudiana | SEQ ID NO: 172 (aa) |
| P450-2-1 | SEQ ID NO: 79 (nt) |
| G. fujikuroi | SEQ ID NO: 80 (aa) |

[0355] As shown in FIG. 16, the strain accumulated gibberellins, including, but not limited to GA₄ and GA₁₄. After approximately 160 hours of fermentation, the titer in growth medium was 2.2 g/L of GA₄, 55 mg/L of GA₁₄ and 2.3 g/L of KA; 1.04 mM of kaurenol, 4.65 mM of kaurenal and 1.12 mM ent-kaurene. The production of additional gibberellins and intermediate molecules at various time points during growth in the culture medium is shown in Table 18.

TABLE 18
Production of additional
gibberellins and intermediates.

| Time point | GA₄ | GA₁₄ | KA |
|---|---|---|---|
| (hrs) | (μM) | (μM) | (μM) |
| 0 | 0 | 0 | 0 |
| 47 | 642 | 44 | 15 |
| 71 | 1313 | 54 | 79 |
| 95 | 2600 | 120 | 1308 |
| 100 | 2800 | 118 | 1754 |
| 119 | 4659 | 96 | 3090 |
| 125 | 4900 | 88 | 4666 |
| 143 | 5462 | 80 | 6138 |
| 149 | 5845 | 73 | 6898 |
| 167 | 6644 | 88 | 7608 |

### Example 11. Production of GA₃ Using Fungal Gibberellin Pathway Genes

[0356] Using the USER™ based yeast integration vector system, the genes in Table 19 were stably integrated into an S. cerevisiae strain. The strain was grown in a 2 L Sartorius fermentor using a fed batch process. Temperature, pH, agitation, and aeration rate were controlled throughout the cultivation. The temperature was maintained at 30° C. Air was used for sparging the bioreactor at 1 vvm (L gas/(L liquid×min)). pH was controlled at pH 5.0 by automatic addition of NH₄OH. An 8% NH₄OH solution was used for the first 45 hours of the process; a 16% solution was used for the final part. The stirrer speed was initially set to 800 rpm and increased to up to 1600 rpm during the process. The basis for the medium used for the batch phase is 0.5 L minimal medium containing glucose, salts, vitamins and trace metals. The feed solution was either a high density glucose solution with salts, trace metals and vitamins (glucose feed) or 96% ethanol (ethanol feed). Antifoam was included in the batch medium and feed medium. The fermentation was inoculated using a seed train in shake flasks grown at 30° C. using a minimal medium with similar content as the medium used for the batch phase in the fermentation. The batch fermentation lasted for 16 hours. During the carbon-limited fed batch phase, feed was added following an exponential feed profile feeding with glucose feed from 16-70 hours and ethanol feed from 70-148 hours. Since the ethanol feed only contained the carbon source, concentrated feed components (salts, vitamins, trace metals and antifoam) were combined, sterile filtered and added to the fermentation broth once or twice per day during feeding with ethanol feed. After 148 hours of fermentation, the titer in growth medium was measured to be 491 mg/L (1.42 mM) of GA₃ and 2.15 mM of kaurenol, 4.26 mM of kaurenal and 1.28 mM ent-kaurene. The production of GA₃, GA₄ and additional gibberellins and intermediate molecules at various time points during growth in the culture medium is shown in Table 20. The results demonstrate that a yeast strain comprising fungal gibberellin genes can produce gibberellins.

TABLE 19
Genes integrated in S. cerevisiae strain
for production of gibberellins, including GA₃

| Gene | SEQ ID NOs |
|---|---|
| DAP1-2 | SEQ ID NO: 212 (nt) |
| F. fujikuroi | SEQ ID NO: 213 (aa) |
| ICE2-2 | SEQ ID NO: 205 (nt) |
| F. fujikuroi | SEQ ID NO: 206 (aa) |
| CDPS-KS-6 | SEQ ID NO: 101 (nt) |
| F. fujikuroi | SEQ ID NO: 102 (aa) |
| KS5 | SEQ ID NO: 181 (nt) |
| A. thaliana | SEQ ID NO: 182 (aa) |
| FfCytB5-1 | SEQ ID NO: 159 (nt) |
| (codon optimized) | SEQ ID NO: 160 (aa) |
| F. fujikuroi | |
| FfCytB5red-1 | SEQ ID NO: 01 (nt) |
| (codon optimized) | SEQ ID NO: 02 (aa) |
| F. fujikuroi | |
| KAO3 | SEQ ID NO: 145 (nt) |
| G. fujikuroi | SEQ ID NO: 146 (aa) |
| CPR19 | SEQ ID NO: 193 (nt) |
| G. fujikuroi | SEQ ID NO: 194 (aa) |
| CPR12 | SEQ ID NO: 167 (nt) |
| R. suavissimus | SEQ ID NO: 168 (aa) |
| RsKO | SEQ ID NO: 169 (nt) |
| R. suavissimus | SEQ ID NO: 170 (aa) |
| GGPPS-7 | SEQ ID NO: 177 (nt) |
| Synecococcus sp. | SEQ ID NO: 178 (aa) |
| KO1 | SEQ ID NO: 171 (nt) |
| S. rebaudiana | SEQ ID NO: 172 (aa) |
| P450-2-1 | SEQ ID NO: 79 (nt) |
| G. fujikuroi | SEQ ID NO: 80 (aa) |
| KAO4 | SEQ ID NO: 73 (nt) |
| S. manihoticola | SEQ ID NO: 74 (aa) |
| DES-1 | SEQ ID NO: 25 (nt) |
| F. fujikuroi | SEQ ID NO: 26 (aa) |

TABLE 20
Gibberellin production in samples.

| | GA₁ | GA₃ | GA₄ | GA₁₃ | GA₁₄ | GA₂₅ | KA |
|---|---|---|---|---|---|---|---|
| Hours | (mM) | (mM) | (mM) | (mM) | (mM) | (mM) | (mM) |
| 0 | 0 | 0 | 0 | 0 | 0 | 0 | 0 |
| 46 | 0 | 0.261 | 0.0219 | 0.025 | 0.0504 | 0.00166 | 0.1723 |
| 71 | 0.0475 | 0.7185 | 0.0479 | 0.087 | 0.111 | 0.0482 | 1.472 |
| 94 | 0.2074 | 0.8399 | 0.1604 | 0.119 | 0.2169 | 0.114 | 1.486 |
| 118 | 0.4897 | 1.1385 | 0.1726 | 0.187 | 0.3098 | 0.187 | 2.836 |
| 124 | 0.5221 | 1.3315 | 0.1693 | 0.215 | 0.3197 | 0.203 | 2.825 |
| 142 | 0.547 | 1.3452 | 0.1438 | 0.224 | 0.1983 | 0.187 | 2.6623 |
| 148 | 0.681 | 1.4241 | 0.1684 | 0.257 | 0.1985 | 0.209 | 3.833 |

### Example 12. Engineering of S. Cerevisiae Strain for Production of Gibberellin Å₃ (GA₃) Comprising Plant GA₃ₒₓ Genes

[0357] Using the USER™ based yeast integration vector system, the genes in Table 19 were stably integrated into an S. cerevisiae strain. The strain was grown in DELFT culture medium supplemented with uracil to complement uracil auxotrophy of the strain for 96 hours. Samples were extracted with acetonitrile (80% final) and cultures were analysed using LC-MS. The production of GA₄ and additional gibberellins and intermediate molecules at various time points during growth in the culture medium is shown in Table 22.

TABLE 21
Genes integrated in S. cerevisiae strain
for production of Gibberellins, including GA₃.

| Gene | SEQ ID NOs |
|---|---|
| DAP1-2 | SEQ ID NO: 212 (nt) |
| F. fujikuroi | SEQ ID NO: 213 (aa) |
| CytB5-2 | SEQ ID NO: 238 (nt) |
| | SEQ ID NO: 239 (aa) |
| CytB5red-4 | SEQ ID NO: 240 (nt) |
| | SEQ ID NO: 241 (aa) |
| FfCytB5-1 | SEQ ID NO: 159 (nt) |
| (codon optimized) | SEQ ID NO: 160 (aa) |
| F. fujikuroi | |
| FfCytB5red-1 | SEQ ID NO: 01 (nt) |
| (codon optimized) | SEQ ID NO: 02 (aa) |
| F. fujikuroi | |
| KAO11 | SEQ ID NO: 63 (nt) |
| P. sativum | SEQ ID NO: 64 (aa) |
| CPR12 | SEQ ID NO: 167 (nt) |
| R. suavissimus | SEQ ID NO: 168 (aa) |
| CDPS-K56 | SEQ ID NO: 101 (nt) |
| F. fujikuroi | SEQ ID NO: 102 (aa) |
| KS5 | SEQ ID NO: 181 (nt) |
| A. thaliana | SEQ ID NO: 182 (aa) |
| GGPPS-7 | SEQ ID NO: 177 (nt) |
| Synecococcus sp. | SEQ ID NO: 178 (aa) |
| KO1 | SEQ ID NO: 171 (nt) |
| S. rebaudiana | SEQ ID NO: 172 (aa) |
| GA13ox-1 | SEQ ID NO: 97 (nt) |
| O. sativa | SEQ ID NO: 98 (aa) |
| GA20ox-4 | SEQ ID NO: 39 (nt) |
| C. maxima | SEQ ID NO: 40 (aa) |
| GA3ox-1 | SEQ ID NO: 27 (nt) |
| M. macrocarpus | SEQ ID NO: 28 (aa) |

TABLE 22
Gibberellin production in samples.

| Sample | | | | | GA₄ | | | Kaurenoic |
|---|---|---|---|---|---|---|---|---|
| Name | Genes added to strain | GA₁₂ | GA₂₀ | GA₄ | (μM) | GA₅₃ | GA₉ | acid (μM) |
| A8 | GA13-1 + GA20-4 + | 131195 | | 12295 | 1.7 | 2650 | 9515 | 142 |
| | GA3-1 + CPR12 | | | | | | | |
| B1 | GA13-1 + GA20-4 + | 49045 | 1655 | 20950 | 2.8 | 56745 | — | 267 |
| | GA3-1 | | | | | | | |
| C5 | GA13-1 + GA20-4 + | 52565 | 12895 | 1000 | 0.4 | 25460 | 48505 | 248 |
| | GA3-2 + CPR12 | | | | | | | |
| D12 | GA13-1 + GA20-4 + | 37435 | 8295 | 1810 | 0.5 | 36520 | 39465 | 222 |
| | GA3-2 | | | | | | | |
| E11 | GA13-1 + GA20-4 + | 44830 | 9910 | — | 0.0 | 21450 | 46010 | 214 |
| | GA3-3 + CPR12 | | | | | | | |
| F7 | GA13-1 + GA20-4 + | 33515 | 14010 | — | 0.0 | 26235 | 33335 | 220 |
| | GA3-3 | | | | | | | |
| G4 | GA13-1 + GA20-4 + | 28910 | 8860 | 26495 | 3.6 | 7845 | 25180 | 108 |
| | GA3-4 + CPR12 | | | | | | | |
| H9 | GA13-1 + GA20-4 + | 34550 | 9990 | 16545 | 2.2 | 31830 | 4160 | 144 |
| | GA3-4 | | | | | | | |
| | Values are AUC | | | | | | | |
| | values, except for | | | | | | | |
| | GA(uM) and Kaurenoic | | | | | | | |
| | acid (uM) | | | | | | | |

[0358] These results demonstrated that plant GA13 ox, GA20 ox and GA3 ox genes were all active in yeast and that when combined they can catalyse the reactions from GA₁₂ to GA₅₃ (GA13 ox reaction) to GA₉ (GA20 ox reaction) to GA₂₀ (GA13 ox+GA20 ox reactions via either GA₅₃ or GA₉) and then further GA₉ to GA₄ reaction catalyzed by GA₃ₒₓ genes. Further analysis revealed that sample B1 and sample C5 also contained small amounts of GA₃, which thereby demonstrated a fully functional GA₃ pathway from ent-kaurene based on plant derived genes (see FIG. 17 and FIG. 18). Mass spectra corresponding to the peaks with RT 0.96 were extracted as seen in FIG. 17. The signal detected at m/z 345.1336 fit with the mass of GA₃ (2.1 ppm error). To further investigate, samples were analyzed using MRM to investigate fragment formation. Using a collision energy of 32 eV, ions with m/z were isolated and fragmented. MS/MS spectra can be seen in FIG. 18.

### Example 13. Production of Gibberellin Å₃ (GA₃) and Other Gibberellins Using a S. Cerevisiae Strain Comprising Plant GA20 Oxidase, GA3 Oxidase and GA13 Oxidase Genes

[0359] The “B1” strain from Example 12 was grown in a 2 L Sartorius fermentor using a fed batch process. Temperature, pH, agitation, and aeration rate were controlled throughout the cultivation. The temperature was maintained at 30° C. Air was used for sparging the bioreactor at 1 vvm (L gas/(L liquid×min)). pH was controlled at pH 5.0 by automatic addition of NH₄OH. An 8% NH₄OH solution was used for the first 45 hours of the process; a 16% solution was used for the final part. The stirrer speed was initially set to 800 rpm and increased to up to 1600 rpm during the process. The basis for the medium used for the batch phase is 0.5 L minimal medium containing glucose, salts, vitamins and trace metals. The feed solution was either a high density glucose solution with salts, trace metals and vitamins (glucose feed) or 96% ethanol (ethanol feed) supplemented with uracil to complement uracil auxotrophy of the strain. Antifoam was included in the batch medium and feed medium. The fermentation was inoculated using a seed train in shake flasks grown at 30° C. using a minimal medium with similar content as the medium used for the batch phase in the fermentation. The batch fermentation lasted for 16 hours. During the carbon-limited fed batch phase, feed was added following an exponential feed profile feeding with glucose feed from 16-70 hours and ethanol feed from 70-138 hours. Since the ethanol feed only contained the carbon source, concentrated feed components (salts, vitamins, trace metals and antifoam) were combined, sterile filtered and added to the fermentation broth once or twice per day during feeding with ethanol feed.

[0360] As shown in Table 23, the strain accumulated gibberellins, including, but not limited to GA₃, GA₄ and GA₁₄. After approximately 138 hours of fermentation, the titer in growth medium was 1.7 μM of GA₃, 73 μM of GA₁, 82 μM of GA₄, 1.8 μM GA₇, 2400 μM of KA as well as estimated amounts of 214 μM of GA₂₀, 1.5 μM of GA₉, 134 μM of GA₂₄, 128 μM of GA₅₃ and 142 μM of GA₁₂. The production of additional gibberellins and intermediate molecules at various time points during growth in the culture medium is shown in Table 23.

TABLE 23
Production of additional gibberellins and intermediates.

| Time | | | | | | | | | | |
|---|---|---|---|---|---|---|---|---|---|---|
| point | GA₃ | GA₁ | GA₇ | GA₄ | KA | GA₂₀ | GA₉ | GA₂₄ | GA₅₃ | GA₁₂ |
| (hrs) | (μM) | (μM) | (μM) | (μM) | (μM) | (μM) | (μM) | (μM) | (μM) | (μM) |
| 116 h | 1.4 | 47 | 0 | 48 | 388 | 4.7 | 2.5 | 32 | 38 | 39 |
| 138 h | 1.7 | 73 | 1.8 | 482 | 2400 | 214 | 1.5 | 134 | 128 | 142 |

### Example 14. Engineering of S. Cerevisiae Strain for Production of Gibberellin A₃ (GA₃) Comprising Plant GA₁₃ₒₓ Genes

[0361] Using the USER™ based yeast integration vector system, the genes in Table 24 and Table 25 were stably integrated into an S. cerevisiae strain comprising the genes as shown in Table 17. The strain was grown in DELFT culture medium for 96 hours. Samples were extracted with acetonitrile (80% final) and cultures were analyzed using LC-MS. By testing plant GA₁₃ oxidase in a GA₄ producing strain, the results demonstrate that the plant GA₁₃ oxidase can replace the fungal P450-3 enzyme, which is demonstrated by the formation of GA₁ and GA₃. See Table 26.

TABLE 24
Genes integrated in S. cerevisiae
strain for production of Gibberellins
(Transformants H1, H2 and H3)

| Gene | SEQ ID No. |
|---|---|
| GA13ₒₓ₋₁ | SEQ ID NO: 97 (nt) |
| Oryza sativa | SEQ ID NO: 98 (aa) |
| DES-1 | SEQ ID NO: 25 (nt) |
| Fusarium fujikuroi | SEQ ID NO: 26 (aa) |

TABLE 25
Genes integrated in S. cerevisiae strain
for production of Gibberellins
(Transformants I1, I2 and I3)

| Gene | SEQ ID No. |
|---|---|
| P450-3-4 | SEQ ID NO: 185 (nt) |
| Fusarium fujikuroi | SEQ ID NO: 186 (aa) |
| DES-1 | SEQ ID NO: 25 (nt) |
| Fusarium fujikuroi | SEQ ID NO: 26 (aa) |

TABLE 26
Production of additional gibberellins and intermediates.

| | Unit: | | | | | | | | | | | | |
|---|---|---|---|---|---|---|---|---|---|---|---|---|---|
| | AUC | | μM | | | | | μM | | | | | AUC |
| | Epoxide | AUC | GA1 | AUC | AUC | AUC | AUC | GA3 | AUC | AUC | AUC | AUC | Kaurenoic |
| Sample | GA3 | GA1 | (μM) | GA12 | GA13 | GA14 | GA3 | (μM) | GA4 | GA53 | GA7 | GA9 | acid |
| H1 | | 37360 | 13 | 30740 | 67050 | 205185 | 3180 | 0.40 | 144395 | 29615 | 235460 | 6705 | 895 |
| H2 | | 58995 | 20 | 19280 | 71720 | 106075 | 1955 | 0.10 | 248700 | 43880 | 205265 | 8160 | |
| H3 | | 60405 | 21 | 22755 | 52950 | 82190 | 800 | 0.04 | 345500 | 42085 | 91190 | 6575 | |
| I1 | 10760 | 85885 | 30 | 45290 | 85105 | 103710 | 87870 | 22.10 | 114315 | 0 | 6495 | 9955 | |
| I2 | 8265 | 62160 | 21 | 28320 | 79895 | 73755 | 63840 | 15.90 | 145540 | 0 | 7630 | 8395 | |
| I3 | 11700 | 91795 | 32 | 56205 | 92035 | 111315 | 90000 | 22.70 | 119980 | 0 | 6840 | 11305 | |

[0362] Having described the invention in detail and by reference to specific embodiments thereof, it will be apparent that modifications and variations are possible without departing from the scope of the invention defined in the appended claims. More specifically, although some aspects of the present invention are identified herein as particularly advantageous, it is contemplated that the present invention is not necessarily limited to these particular aspects of the invention.

TABLE 27
Sequences disclosed herein.

SEQ ID NO: 1

| | |
|---|---|
| atgtcctcta acggtgataa ccattctttg ttcgccagac attacatcga ttatgtttat | 60 |
| gctccaggtt tgttgttggt tgtcggtact ttgatcgtta agaaagaatg ggctccatgg | 120 |
| gctttgttag ttgctgttgt ttttggtatc tacaacttca tggccttcca agttaagact | 180 |
| actttgaagc cagatgtttt ccaagaattt gaattggaag aaaagaccat cgtcagtcat | 240 |
| aacgttgcta tctacagatt caaattgcca tccccaaaac acattttggg tttgccaatt | 300 |
| ggtcaacaca tttctattgg tgctccatgt ccacaaccag atggtactac aaaagaaatc | 360 |
| gttagatcct acaccccaat ctctggtgat catcaaccag gtcatgttga tttgttgatc | 420 |
| aagtcttacc cacaaggtaa catctccaaa catatggcat ctttgactgt tggtcaaacc | 480 |
| attaaggtta gaggtccaaa aggtgctttt gtctacactc caaatatggt tagacacttc | 540 |
| ggtatgattg ctggtggtac tggtattact ccaatgttgc aagttattag agccatcgtt | 600 |
| agaggtagag ctgctggtga taagactgaa gttgatttga ttttcgctaa cgttaccgcc | 660 |
| caagacatct tgttgaaaga agatttggac gctttggcca agcaagattc tggtattaga | 720 |
| gttcattacg tcttggacaa acctgaagaa ggttggactg gtggtgttgg ttatgttact | 780 |
| gctgatatga tcgataagta cttgccaaaa ccagccgatg atgttaagat tttgttgtgt | 840 |
| ggtccaccac caatgatttc tggtttgaaa aaagctaccg aatccttggg ttttaagaag | 900 |
| gctagaccag tttctaagtt ggttgaccaa gttttcgctt tttaa | 945 |

SEQ ID NO: 2

| | |
|---|---|
| MSSNGDNHSL FARHYIDYVY APGLLLVVGT LIVKKEWAPW ALLVAVVFGI YNFMAFQVKT | 60 |
| TLKPDVFQEF ELEEKTIVSH NVAIYRFKLP SPKHILGLPI GQHISIGAPC PQPDGTTKEI | 120 |
| VRSYTPISGD HQPGHVDLLI KSYPQGNISK HMASLTVGQT IKVRGPKGAF VYTPNMVRHF | 180 |
| GMIAGGTGIT PMLQVIRAIV RGRAAGDKTE VDLIFANVTA QDILLKEDLD ALAKQDSGIR | 240 |
| VHYVLDKPEE GWTGGVGYVT ADMIDKYLPK PADDVKILLC GPPPMISGLK KATESLGFKK | 300 |
| ARPVSKLVDQ VFAF | 314 |

SEQ ID NO: 3

| | |
|---|---|
| atgtcagggc aatctctgcc aacactacct atgtggcgtg ttgatcatat agaaccgagt | 60 |
| cccgaaatgt tggcactgag ggctaatggt ccaatccata gggtaaggtt tccgtctggg | 120 |
| cacgagggtt ggtgggtgac aggttacgaa gaggccaagg cagtgttgag cgacgccgct | 180 |
| tttagaccat ccggtatgcc gccagcagca ttcacacccg caacagtcat acttggttcc | 240 |
| ccaggttggt tgggaagtca tgaaggttct gaacatgcaa gattgagaac aattgtagct | 300 |
| cccgcatttt caaatagacg tgtgaagcta ctagcacaac agatcgaagc aattgctgca | 360 |
| caattgtttg aaacgctagc agcacaacct cagcccgctg atctgagaca ttacttatcc | 420 |
| tttcctcttc ctgctatggt gattagtgcc ttgatgggtg taccatatga agatcacgct | 480 |
| ttttttgcag aacttagtga cgaagttatg acccaccaac atgagtccgg tcctagaagc | 540 |
| gctgcgctac tggcatgggg agagttaagg acctacatca gaggcaaaat gagggggaaa | 600 |
| agacaagacc caggagataa tctacttact gacttacttg ctgccgttga tcagggcaag | 660 |
| gcaactgagg aagaagccat aggtcttgct gcaggaattc ttgttgcagg ccacgaatca | 720 |
| actgttgcac aaatagaatt tggtttactg gctatgtcca gacaccctca tcagcgtgag | 780 |
| agattagttg gagatccatc tttagtcgac aaggcagtgg aggaaatttt acgtatgtac | 840 |
| cctccaggcg ccggatggga tggtattatg agatatccta gaactgatgt gacaatagcg | 900 |
| ggggttcata ttccagctga aagcaaagtg ttagttggct tgcctgccac aagttttgat | 960 |
| ccccatcact tcgacgatcc tgagaacttt gatataggaa gagcagaaaa gcctcactta | 1020 |
| gctttttcat atggtcctca ttattgcatt ggtgaagcct tggcacgttt agaacttaag | 1080 |
| gtagtctttg gttccatctt tcaaagattc ccgacgttgc gtttggctgt cgcacccgaa | 1140 |
| gagttaaagt taagaaagga tataatcaca ggaggattcg aagaattccc cgtattatgg | 1200 |
| taa | 1203 |

SEQ ID NO: 4

| | |
|---|---|
| MSGQSLPTLP MWRVDHIEPS PEMLALRANG PIHRVRFPSG HEGWWVTGYE EAKAVLSDAA | 60 |
| FRPSGMPPAA FTPATVILGS PGWLGSHEGS EHARLRTIVA PAFSNRRVKL LAQQIEAIAA | 120 |
| QLFETLAAQP QPADLRHYLS FPLPAMVISA LMGVPYEDHA FFAELSDEVM THQHESGPRS | 180 |
| AALLAWGELR TYIRGKMRGK RQDPGDNLLT DLLAAVDQGK ATEEEAIGLA AGILVAGHES | 240 |
| TVAQIEFGLL AMSRHPHQRE RLVGDPSLVD KAVEEILRMY PPGAGWDGIM RYPRTDVTIA | 300 |
| GVHIPAESKV LVGLPATSFD PHHFDDPENF DIGRAEKPHL AFSYGPHYCI GEALARLELK | 360 |
| VVFGSIFQRF PTLRLAVAPE ELKLRKDIIT GGFEEFPVLW | 400 |

SEQ ID NO: 5

| | |
|---|---|
| atgttcgaac agcctttgcc gaccttgccg atgtggagag ttgatcacat cgaaccttct | 60 |
| cctgagatgt tagctctaag ggctaaaggt ccaatccata gagtgcgttt tccttcaggg | 120 |
| catgagggat ggtgggttac tggttacgac gaagctcaag cagttttatc agatgctgcc | 180 |
| tttagaccag ccggtatgcc tccagaaaca tttacaccgg attcagttat tttgggtagt | 240 |
| ccaggttggc ttgtatctca cgaaggaggt aaacacgctt ggctaagaat gattgttgcc | 300 |
| ccagcattct caaataggag ggtgaaattg ttagcccaac aagtcgaggc catagctgct | 360 |
| caattgttcg aaacactggc tgctcaacca caaccagccg atttaagaag acacttatca | 420 |
| tttccattgc cagctatggt gatttcagca ctaatgggcg ttttatatga agatcatata | 480 |
| ttcttcgccg gtttatcaga cgaagtcatg acccaccaac atgagtccgg cccgagatct | 540 |
| gccagcagag tcgcttggga agagcttaga acctacattt gcagaaagat gagaggtaag | 600 |
| agggaagagc caggtgacaa tttacttacc gatttgttgg cggctgtgga tcatggcaaa | 660 |
| gcaactgaag aagaggcagt tggtttggct gccggtgttc ttgtagcagg ccatgaaagt | 720 |
| actgtagctc aaattgaatt tggcctgtta gctatgttca ggcaccccca acaaagggag | 780 |
| agattggtta gagacccatt cctagccgat aaagctgtag aggaaatttt aagaatgtac | 840 |
| agccccggcg ctggttggga tggcattatg agatacccta gaactgatgt cactatagct | 900 |
| ggtatggaca ttcccgccga atcaaaagtc ttagtgggtt tacctgccac ttcattcgac | 960 |
| ccaaggcact tcgaagatcc ggaagtattt gatataggta gggatccaaa cccacaccta | 1020 |
| gcgttttcct atggcccaca caattgcatc ggtgcagcat tggctagact tgaattaaaa | 1080 |
| gtggtatttg gttccatatt ccagagattc ccggccctaa ggctagctgt agctccagaa | 1140 |
| gaactgaagt tgagaaaaga aataattacg ggcgggtttg aagaatttcc agtcctatgg | 1200 |

SEQ ID NO: 6

| | |
|---|---|
| MFEQPLPTLP MWRVDHIEPS PEMLALRAKG PIHRVRFPSG HEGWWVTGYD EAQAVLSDAA | 60 |
| FRPAGMPPET FTPDSVILGS PGWLVSHEGG KHAWLRMIVA PAFSNRRVKL LAQQVEAIAA | 120 |
| QLFETLAAQP QPADLRRHLS FPLPAMVISA LMGVLYEDHI FFAGLSDEVM THQHESGPRS | 180 |
| ASRVAWEELR TYICRKMRGK REEPGDNLLT DLLAAVDHGK ATEEEAVGLA AGVLVAGHES | 240 |
| TVAQIEFGLL AMFRHPQQRE RLVRDPFLAD KAVEEILRMY SPGAGWDGIM RYPRTDVTIA | 300 |
| GMDIPAESKV LVGLPATSFD PRHFEDPEVF DIGRDPNPHL AFSYGPHNCI GAALARLELK | 360 |
| VVFGSIFQRF PALRLAVAPE ELKLRKEIIT GGFEEFPVLW | 400 |

SEQ ID NO: 7

| | |
|---|---|
| atgtctgaac aaccactacc gacccttcca atgtggagag tagaccacat tgaaccgagt | 60 |
| cccgaaatgt tggcccttag agctaatgga cccatccata gagtgagatt cccatccgga | 120 |
| cacgaaggct ggtgggtcac tggatatgat gaagccaagg ctgtcttaag tgatactgcg | 180 |
| ttcagaccag ccggaatgcc accagctgct tttactccgg atagcgttat ccttggcagt | 240 |
| ccgggttggt tagtttcaca cgaaggaggt gagcatacaa gattaaggac catagtcgcc | 300 |
| cctgcgtttg gtgattcaag aatcaaattg TTagcacagc aagtcgaggc cattgcagca | 360 |
| caacttttta aaactttatc cacacagcct caaccagctg acttaagacg tcatctttcc | 420 |
| tttcctttac cagccatggt tatatcagcc ttgatgggtg ttcgttacga agatcatgct | 480 |
| tttttcgcag gtctgtcaga tgaagtaatg actcaccagc atgaatccgg acccaggagc | 540 |
| gccagtcgtc ttgcatggga agaattgaga gcatatataa gagatcgtat gcgtgaaaag | 600 |
| agacaggatc caggtgataa cctgctgact gatttattgg cggcggtgga tcaaggtaaa | 660 |
| gcaagtgaag aagaagctat tggactggca gctggcatgt tagttgctgg gcatgagagc | 720 |
| acagcagctc aaatagaatg tggtctatta gcgatgttta gacatccaca gcaaagagaa | 780 |
| aggcttgttg ctgacccaag tttattagat aaaaccgtcg aggaaatttt aagaatgtac | 840 |
| ccacctgggg ctggttggga tgggattatg agatacccta gaacagatgt gactatcgct | 900 |
| ggtgtacaca tccctgctga atctaaagtc cttgtgggat tacctgctac ctcttttgat | 960 |
| ccgaggcagt ttgatgatcc tgagatattt gacatcggta gagacgagaa acctcatctg | 1020 |
| gctttttcct acggtccgca ctattgcatc ggcggtgcat tggctagatt ggaattgaag | 1080 |
| gcagttttcg gatctatttt ccaaagattt cctggtttaa gattagcagt tgctccagaa | 1140 |
| gaattacgtc tgagaaaaga gattattaca ggcggatttg aggagatgcc agtgctgtgg | 1200 |
| taa | 1203 |

SEQ ID NO: 8

| | |
|---|---|
| MSEQPLPTLP MWRVDHIEPS PEMLALRANG PIHRVRFPSG HEGWWVTGYD EAKAVLSDTA | 60 |
| FRPAGMPPAA FTPDSVILGS PGWLVSHEGG EHTRLRTIVA PAFGDSRIKL LAQQVEAIAA | 120 |
| QLFKTLSTQP QPADLRRHLS FPLPAMVISA LMGVRYEDHA FFAGLSDEVM THQHESGPRS | 180 |
| ASRLAWEELR AYIRDRMREK RQDPGDNLLT DLLAAVDQGK ASEEEAIGLA AGMLVAGHES | 240 |
| TAAQIECGLL AMFRHPQQRE RLVADPSLLD KTVEEILRMY PPGAGWDGIM RYPRTDVTIA | 300 |
| GVHIPAESKV LVGLPATSFD PRQFDDPEIF DIGRDEKPHL AFSYGPHYCI GGALARLELK | 360 |
| AVFGSIFQRF PGLRLAVAPE ELRLRKEIIT GGFEEMPVLW | 400 |

SEQ ID NO: 9

| | |
|---|---|
| atgagcgaac agcctttacc tatgttgccc atgtggagag tagatcacat cgagccatca | 60 |
| cccgaaatgt tagcactgag agcaaaaggg cctatacacc gtgttagatt tccgtctggt | 120 |
| gatgaaggtt ggtgggtgac cggttacgac gaagcaaaag cggtgttatc agatgctgcg | 180 |
| tttaggccca gcggtatgcc ccctgcagct gtgactagtg ctacagtcat attgggttca | 240 |
| ccgggctggt tggggagcca tgagggttct gaacacgcta gactgagaac catcgtagcc | 300 |
| cctgcctttt cttcaggtag agtcaaattg ttagcacaac aagtggaagc cattgcagct | 360 |
| gagttattcg aaaccttggc ggcccaacca cagccagcag acctgagaag acacttgagt | 420 |
| tttccgcttc ccgctatggt gatttctgcc ttaatgggcg tgctgtatga agaccatgcc | 480 |
| tttttcgccc gtttgagtga taaagtaatg acccatcaat atgaaagtgg tcctcgttca | 540 |
| gcggcacgtt tggcgtggga ggagttaaga gcatatatta gaggcaagat gcgtgataag | 600 |
| agacaagacc ccggagacaa cttgctaacc gatttgcttg cagcagtgga tcaaggtaaa | 660 |
| gcaacggaag aggaagcaat aggattggca gcaggtatgt tggtcgcagg acatgaaacc | 720 |
| acagtggcgc agattgaatt cggtctattg gctatgttta ggcatccaca gcaaagagag | 780 |
| agattagttg gcgacccgag tttggtcgat aaggcagtag aggagatttt gagaatgtat | 840 |
| cctcctggtg ccggatggga tggtattatg aggtatccaa gaacagacgt cactattgca | 900 |
| ggagtacata tcccagccga gagcaaggtc ctggttggtt tgccggctac atcctttgat | 960 |
| cccagacatt ttgacgatcc agaaattttt gatgtgggaa gagaggaaaa acctcatcta | 1020 |
| gccttctcat atggaccaca ttactgcatc ggagtggagt tggcacgttt ggaattgaga | 1080 |
| gttgtctttg gttcaatatt ccagagattt ccagcgctta gactggcggt ggccccagag | 1140 |
| gaattgaaat tgagaaaggc catcattact ggcggttttg aagcttttcc cgttttatgg | 1200 |
| tga | 1203 |

SEQ ID NO: 10

| | |
|---|---|
| MSEQPLPMLP MWRVDHIEPS PEMLALRAKG PIHRVRFPSG DEGWWVTGYD EAKAVLSDAA | 60 |
| FRPSGMPPAA VISATVILGS PGWLGSHEGS EHARLRTIVA PAFSSGRVKL LAQQVEAIAA | 120 |
| ELFETLAAQP QPADLRRHLS FPLPAMVISA LMGVLYEDHA FFARLSDKVM THQYESGPRS | 180 |
| AARLAWEELR AYIRGKMRDK RQDPGDNLLT DLLAAVDQGK ATEEEAIGLA AGMLVAGHET | 240 |
| TVAQIEFGLL AMFRHPQQRE RLVGDPSLVD KAVEEILRMY PPGAGWDGIM RYPRTDVTIA | 300 |
| GVHIPAESKV LVGLPATSFD PRHFDDPEIF DVGREEKPHL AFSYGPHYCI GVELARLELR | 360 |
| VVFGSIFQRF PALRLAVAPE ELKLRKAIIT GGFEAFPVLW | 400 |

SEQ ID NO: 11

| | |
|---|---|
| atggcggaat tagatacgtt agatatcgtt gttttaggcg ctttattgtt gggcacatta | 60 |
| gcgtatttta cgaagggcac attatggggt gtcactaagg atccttatgc aaacgctttc | 120 |
| gcaaatgcta acggagctaa agccggcaga tcaagaaata tcgttgaaaa aatggatgaa | 180 |
| tctggtaaaa actgcgtcat attctacggt tctcaaactg gaacggcaga ggattacgca | 240 |
| tcaagattag cgaaagaagg aaagtcaaga ttcgggttag ggactatggt tgcagattta | 300 |
| gaagaatatg attatgataa ccttgataca atgagcggcg ataaggttgc catgtttgtt | 360 |
| cttgctacct atggcgaggg cgaaccaact gacaacgcag tagagtttta tgaatttatt | 420 |
| actggtgaag gggttgcttt tagtgaagga aacgatcccc ccttaggcaa tctgaactac | 480 |
| gtggcctttg gactggggaa caatacttat gaacactaca attcaatggt cagaaatgtc | 540 |
| gataaagccc ttaggaatct gggtgctcat aggatcggag aggctggtga aggcgatgac | 600 |
| ggtgctggca caatggaaga agattttcta gcatggaagg aaccaatgtg ggccgcctta | 660 |
| gctgacaaaa tgggtttgga ggaaagggaa gcagtatatg accctgtgtt cagtatcgtt | 720 |
| gatcgtgata atttgactcc tgaaagccca gaagtctatt tgggtgaacc taataaaatg | 780 |
| catttagagg atgcggtcaa gggcccattt aattctcata atccatatat agcaccaata | 840 |
| gctgaatcta gagaattgtt tagtgttaaa gacaggaatt gcatccatat ggaaattgac | 900 |
| atagacggtt caaatttgag ctatcaaact ggggatcatg tggctatttg gcctaccaac | 960 |
| ccaggagatg aagtggatag atttttagac atcattgatt taaaggataa acgtgacaag | 1020 |
| gttataggag tgaaagcact tgaaccaact gcaaaggtcc cttttccaac accaacaaca | 1080 |
| tatgacgtta tcgccaggta tcatttagaa atctgtgcac cggtctctag acagtttgtg | 1140 |
| tccactctag cagcattctc cccaaatgat gaggtaaaag cagaaatgac tagattgggt | 1200 |
| aacgataagg attattttca tgataagacg ggcccacatt attataatat cgcccgtttt | 1260 |
| ctagctgcgg ttggtaaggg cgagaaatgg tcaaatatcc ctttttctgt ttttgtcgaa | 1320 |
| ggtttaacga aattacaacc aagatattat tcaatctcct cttcaagcct agtacaacca | 1380 |
| aaaaaaatat caataacggc agtaattgag tcacaggtta tacctgccag gcaagatcca | 1440 |
| tttagaggtg tagctacgaa ctacttattt gcattgaaac agaagcaaaa cggtgatcca | 1500 |
| aatccctccc catttggaca tacttatgca ttaaacggcc ctagaaataa atttgacggt | 1560 |
| atacacgtcc ccgtccacgt aaggcactcc aatttcaaac taccgagcga tccagcaaaa | 1620 |
| ccagttatta tggttggtcc aggaactgga gtggctccgt ttagaggttt catccaagag | 1680 |
| agagctaaac aggcccagga tggggccaca gtaggccgta ctatcttgtt cttcggttgc | 1740 |
| caacgtaggt ccgaagattt tttgtacgaa agtgaatgga aagaatacaa ggaagttcta | 1800 |
| ggagataccc ttgagatagt cactgccttc tccagggaaa catcaaagaa agtttatgtg | 1860 |
| cagcacaggt tgaaagagag atccaaagaa atcggagaac tattatcaca gaaagcatac | 1920 |
| ttttatgtgt gtggcgatgc tgctcatatg gctagagaag ttaatactgt attggctcaa | 1980 |
| attatcgctg aatctagggg tgtaagtgaa gccaagggtg aagagattgt taaaaatatg | 2040 |
| agggctgcta atcagtacca agttaggagg gggaacaatg tctttttttg ggctataagt | 2100 |
| ggttctattg atatgacggc caataccgcc aacttacaag aagatgtgtg gagctga | 2157 |
| SEQ ID NO: 12 | |
| MAELDTLDIV VLGALLLGTL AYFTKGTLWG VTKDPYANAF ANANGAKAGR SRNIVEKMDE | 60 |
| SGKNCVIFYG SQTGTAEDYA SRLAKEGKSR FGLGTMVADL EEYDYDNLDT MSGDKVAMFV | 120 |
| LATYGEGEPT DNAVEFYEFI TGEGVAFSEG NDPPLGNLNY VAFGLGNNTY EHYNSMVRNV | 180 |
| DKALRNLGAH RIGEAGEGDD GAGTMEEDFL AWKEPMWAAL ADKMGLEERE AVYDPVFSIV | 240 |
| DRDNLTPESP EVYLGEPNKM HLEDAVKGPF NSHNPYIAPI AESRELFSVK DRNCIHMEID | 300 |
| IDGSNLSYQT GDHVAIWPTN PGDEVDRFLD IIDLKDKRDK VIGVKALEPT AKVPFPTPTT | 360 |
| YDVIARYHLE ICAPVSRQFV STLAAFSPND EVKAEMTRLG NDKDYFHDKT GPHYYNIARF | 420 |
| LAAVGKGEKW SNIPFSVFVE GLTKLQPRYY SISSSSLVQP KKISITAVIE SQVIPARQDP | 480 |
| FRGVATNYLF ALKQKQNGDP NPSPFGHTYA LNGPRNKFDG IHVPVHVRHS NFKLPSDPAK | 540 |
| PVIMVGPGTG VAPFRGFIQE RAKQAQDGAT VGRTILFFGC QRRSEDFLYE SEWKEYKEVL | 600 |
| GDTLEIVTAF SRETSKKVYV QHRLKERSKE IGELLSQKAY FYVCGDAAHM AREVNTVLAQ | 660 |
| IIAESRGVSE AKGEEIVKNM RAANQYQVRR GNNVFFWAIS GSIDMTANTA NLQEDVWS | 718 |

SEQ ID NO: 13

| | |
|---|---|
| atggcaacct tggttcacgt gggtcacttt ggtagaccct tgtgttcagg acaagctttg | 60 |
| cctttgcttc tagccggaat cttggcggca gccttagcaa tcaaagctgc ggcgtggtgc | 120 |
| gctcgtaaac gtcatctagc agaaattcca ttggccaacc caccttcatg gttatttttc | 180 |
| tctagacctg ctgaaagagt agctttggtt aggagtgctg ctgaagcatt gctgcgtgct | 240 |
| agagacgatt tcccacatgg accttttcgt tttctaagtg actggggtga acttctaatc | 300 |
| ttgcctcctg agttcgccga agaaataaga aatgaaccta aactatcttt tgggctagct | 360 |
| gcaatgagag ataatcatgc gaatatacct ggttttgaaa ctgttagaat tgtcggtaga | 420 |
| gatgatcaac ttttacaagc tgttgctaga aaacatctaa caaaacactt ggccaaggcc | 480 |
| atcgaaccat tgtgcgcgga agcaagcctg gctctagcag ttaatctagg tgagtcacca | 540 |
| gactggcaaa cagttagatt gcaacctgcc gtgctggata ttattgcaag gctatccagt | 600 |
| agagtgtatc tgggtgagca attgtgtaga tctcaggact ggttggctgt tacaaagact | 660 |
| tatgccacag cgttttatgc tgcatcatcc aaattgagaa tgtttccaag agctctacgt | 720 |
| ccattggtac attggtggat gccagagtgt cgtagactaa gagctcaacg tagggcagcc | 780 |
| gaagccatta tccgtccttt ggttaggcgt agacaacaag ctaaacaagc ggcagcagcc | 840 |
| gccgggcatc cagcccccgt gtttcatgat gcccttgagt gggctgaaca ggaggctgca | 900 |
| acagctgccg ctgcggccgc agctgggagg tctagatctt gtgatccagt tgtatttcaa | 960 |
| ttggcactgt ccttgctagc aattcacaca acatatgatc ttctgcagca agcaatgact | 1020 |
| gatctagctt ctaatccaca atacataggt cctttaagag atgaagtcgc aagagttgtt | 1080 |
| gggcaagacg ggtggagtaa agcttctttg tataagatga agcttttgga tagtgccctt | 1140 |
| aaggaaactc aaaggttaaa acccggttct attgttacca tgaggcgtgt tgctactgat | 1200 |
| gatgttgctt tgtcatccgg tcttgtgttg aaaaaaggta ccagggttaa cgtcgataat | 1260 |
| aggagaatga ctgacgcggc agtttatgcc gatcctagag tttacaaccc ctggagattt | 1320 |
| tatcaaatga ggctgcaacc cggtaaagaa catgtagctc aattggtttc tacctcccca | 1380 |
| gatcacttgg gatttggcca cggcttgcat tcatgtcctg gtaggttctt cgctgcgaat | 1440 |
| gaagttaagg tagctttggg tcatatgttg ttaaagtatg actggaagct tgctcctgcg | 1500 |
| acggacaaga caccagattg tagaggaatg ttggcaaaag ctagcccaac tactgatgtg | 1560 |
| atgatcagga ggagacatga cgaggctgat acaggcgctg cagcaagaga atag | 1614 |

SEQ ID NO: 14

| | |
|---|---|
| MATLVHVGHF GRPLCSGQAL PLLLAGILAA ALAIKAAAWC ARKRHLAEIP LANPPSWLFF | 60 |
| SRPAERVALV RSAAEALLRA RDDFPHGPFR FLSDWGELLI LPPEFAEEIR NEPKLSFGLA | 120 |
| AMRDNHANIP GFETVRIVGR DDQLLQAVAR KHLTKHLAKA IEPLCAEASL ALAVNLGESP | 180 |
| DWQTVRLQPA VLDIIARLSS RVYLGEQLCR SQDWLAVTKT YATAFYAASS KLRMFPRALR | 240 |
| PLVHWWMPEC RRLRAQRRAA EAIIRPLVRR RQQAKQAAAA AGHPAPVFHD ALEWAEQEAA | 300 |
| TAAAAAAAGR SRSCDPVVFQ LALSLLAIHT TYDLLQQAMT DLASNPQYIG PLRDEVARVV | 360 |
| GQDGWSKASL YKMKLLDSAL KETQRLKPGS IVTMRRVATD DVALSSGLVL KKGTRVNVDN | 420 |
| RRMTDAAVYA DPRVYNPWRF YQMRLQPGKE HVAQLVSTSP DHLGFGHGLH SCPGRFFAAN | 480 |
| EVKVALGHML LKYDWKLAPA TDKTPDCRGM LAKASPTTDV MIRRRHDEAD TGAAARE | 537 |

SEQ ID NO: 15

| | |
|---|---|
| atggtcaaca aagaagaaat caccattcca accgctgatt tgtctccatt cttgaaagaa | 60 |
| ttggaccagg gttcttattc ctacgatgat gatgatgacg accaaaagaa aaaaaaggct | 120 |
| gccgccattg aaattattgg taaggcttgt tctgagttcg gtttcttcca agttgttaat | 180 |
| catggtgttc cattgcactt gatgcaaaag gctttgttgt tgtctaatca gttcttcggt | 240 |
| tacccattgg acagaaaatt gcaagcttct ccattgccag gtgctccaat gccagctggt | 300 |
| tatggtagac aaccagatca ttctccagat aagaacgagt tctttatgat gttcccacca | 360 |
| cattctacct tcaacgtttt tccatctcat ccacaaggtt tcagagaagt tgttgaagag | 420 |
| ttgttctctt gcttcgttaa gaccgcttct gttatcgaaa acatcatcaa cgaatgtttg | 480 |
| ggtttgcctc caaatttctt gtctgagtac aacaacgata gaaagtggga tttgatgtcc | 540 |
| actttcagat acccaaacgc ctctgaaatt gaaaacgttg gtttgagaga acacaaggac | 600 |
| gttaacttca ttaccttgtt gttccaagat gaagtcggtg gtttggaagt taagactgaa | 660 |
| gatcatcaat ggatcccaat tatcccaaac cagaacacct tggttattaa cgttggtgat | 720 |
| gttatccagg tcttgtccaa tgatagatac aagtctgctt cccacagagt tgttagacaa | 780 |
| gaaggtagag aaagacactc ttacgctttc ttctacaata tcggtggtga taagttggtt | 840 |
| caaccattgc cacatttcac cacccatatt gatcaaccac caaactacaa gtccttcatc | 900 |
| tacaaagaat acttgcagtt gaggttgaga aacaagactc atccaccatc aaacccacaa | 960 |
| gatatcatca acatctctta ctactctacc acttaa | 996 |

SEQ ID NO: 16

| | |
|---|---|
| MVNKEEITIP TADLSPFLKE LDQGSYSYDD DDDDQKKKKA AAIEIIGKAC SEFGFFQVVN | 60 |
| HGVPLHLMQK ALLLSNQFFG YPLDRKLQAS PLPGAPMPAG YGRQPDHSPD KNEFFMMFPP | 120 |
| HSTFNVFPSH PQGFREVVEE LFSCFVKTAS VIENIINECL GLPPNFLSEY NNDRKWDLMS | 180 |
| TFRYPNASEI ENVGLREHKD VNFITLLFQD EVGGLEVKTE DHQWIPIIPN QNTLVINVGD | 240 |
| VIQVLSNDRY KSASHRVVRQ EGRERHSYAF FYNIGGDKLV QPLPHFTTHI DQPPNYKSFI | 300 |
| YKEYLQLRLR NKTHPPSNPQ DIINISYYST T | 331 |

SEQ ID NO: 17

| | |
|---|---|
| atgatcacct cctacgcagg ttcccaactt ttatcttttt atgtcacaat atttatcttt | 60 |
| acattagtac cttgggctat aagattgttc tggccaaaac ttagaaaggg cagtgtcgtt | 120 |
| ccattggcta atccacctga gagcttgttc ggtaccggta aaacaaggcg tagctttgta | 180 |
| aaattaagcc gtgaaatttt agctaaagca aggaacttat tcccagacga accttttaga | 240 |
| ctgattactg actggggcga ggtgcttatc cttcctccgg agttcgctga tgagatccgt | 300 |
| aatgatccgc gtctgtcatt ttcaaaggct gccatgcagg ataatcacgc aggtattcct | 360 |
| ggcttcgaaa ccgttgcgct tgtgggtaga gaagaccagc tgatacaaaa ggtggctagg | 420 |
| aaacaattga cgaaacatct tagtgccgtt attgaaccat tgagtagaga atcaactctg | 480 |
| gcagtcagtt taaacttcgg ggaatcaact gaatggcgta gtatcagatt aaaacccgca | 540 |
| attctggata ttatcgctag aatctccagc agaatttatt tgggcgatca attgtgtaga | 600 |
| aatgaagcat ggttaaaaat tactaaaacc tatactacaa acttttacac agccagcaca | 660 |
| aaccttagaa tgttcccgag accaattaga cctcttgccc attggttctt gcctgagtgt | 720 |
| agaaaactaa gacaagagag aaaggacgct gtcggtatca ttactccatt gatagagagg | 780 |
| cgtcgtgagt tacgtagagc tgcagtcgca gctggtcaac ctctacccgt ttttcacgat | 840 |
| gcaattgact ggagtgaaca ggaggccgag gcggcgggca gtgggtccgc atttgatcct | 900 |
| gttatttttc aattgacact ttctttgcta gccatccaca ccacctatga cctacttcaa | 960 |
| caaactatga tagacttggg aagacaccca gaatacattg atcccctacg tcaagaagtc | 1020 |
| gttcaattgt taagggaaga aggttggaaa aaaaccactc tgttcaaaat gaaattgctg | 1080 |
| gattctgcta tcaaagaaag tcagagaatg aaaccgggga gtattgttac tatgagaagg | 1140 |
| tatgtcactg aagatataac cttatcatcc ggattaacac ttcataaagg cactagatta | 1200 |
| aacgttgata acaggagact agatgaccca agaatctacg aaaatccgga agtctataat | 1260 |
| ccatatcgtt tttatgatat gaggtccgaa gcttctaagg accatggtgc acagttggta | 1320 |
| agtactggta gtaaccatat gggttttggg catggacaac attcttgtcc cggtagattt | 1380 |
| ttcgcagcta acgagattaa agtagcgttg tgccatatac ttgtaaaata tgattggaaa | 1440 |
| ttatgtccaa atactgagac gaaacctgat acaaggggta tgattgctaa atctagtcct | 1500 |
| gtcacggata ttctaattaa gagaagggaa agcgtggaat tggatttaga agcaatgtaa | 1560 |

SEQ ID NO: 18

| | |
|---|---|
| MVNKEEITIP TADLSPFLKE LDQGSYSYDD DDDDQKKKKA AAIEIIGKAC SEFGFFQVVN | 60 |
| HGVPLHLMQK ALLLSNQFFG YPLDRKLQAS PLPGAPMPAG YGRQPDHSPD KNEFFMMFPP | 120 |
| HSTFNVFPSH PQGFREVVEE LFSCFVKTAS VIENIINECL GLPPNFLSEY NNDRKWDLMS | 180 |
| TFRYPNASEI ENVGLREHKD VNFITLLFQD EVGGLEVKTE DHQWIPIIPN QNTLVINVGD | 240 |
| VIQVLSNDRY KSASHRVVRQ EGRERHSYAF FYNIGGDKLV QPLPHFTTHI DQPPNYKSFI | 300 |
| YKEYLQLRLR NKTHPPSNPQ DIINISYYST T | 331 |

SEQ ID NO: 19

| | |
|---|---|
| atgtctccaa ctcaatctac tactactcca gctacaaaac cagttatggc ttctattcca | 60 |
| tattactccg gtccttttaa tccaccagat accatttctg ctgtttccac taagagatac | 120 |
| tgtgattgga gatccgttaa catcaacgat gttagatctt ccactaagga tttcaccttg | 180 |
| gataagaatg gtttccagta catgaagcac tcttcagctt tatcttctcc accacatact | 240 |
| ttggcttcat ggaaagataa cgaaaccaga aagagagtta acgacgccga aattttggaa | 300 |
| ttgggtaaag ctgttactgg tgccaaaaag gttttggttg ttttggctat tggtagagat | 360 |
| gctgctttta ctgatccatt ggatcaaact tctagaccag atgtctacgg taatcaaact | 420 |
| gatactttgc cagctactag acagttgggt ttttatggtg gtgctaatat tggtccagct | 480 |
| agaaaacctc atgttgattg gggtccagat ggtgttagat ctattttgag aaactggtcc | 540 |
| catgaattgg ctgatgaagc caaggatatt attgatgctg aagatgaagc catctctttg | 600 |
| ccaggtggta ttgaagaaaa ttacaagggt agaagatggg gcttgtataa tacttggagg | 660 |
| ccattgaaac cagtcagaag agatccattg gcttgtgttg atttcgtgtc ctctaagaat | 720 |
| gataagtccg ccattttgtt gagaaagatc ccaggtattc atggtccatg tactgttgat | 780 |
| gctttgttta ctccagctaa tccaaaacat gaatggtact ggatgtctga tcaacaacca | 840 |
| gatgatatct tgttcatgaa gatcttcgat tccgctcacg aaagagatcc aaaaactatt | 900 |
| gctggtggtg ttcatcactg ttcttttcat catccaggta ctgaagatga ggaagtcaga | 960 |
| gaatctttgg agactaagtt tatggctttc tggtaa | 996 |

SEQ ID NO: 20

| | |
|---|---|
| MSPTQSTTTP ATKPVMASIP YYSGPFNPPD TISAVSTKRY CDWRSVNIND VRSSTKDFTL | 60 |
| DKNGFQYMKH SSALSSPPHT LASWKDNETR KRVNDAEILE LGKAVTGAKK VLVVLAIGRD | 120 |
| AAFTDPLDQT SRPDVYGNQT DTLPATRQLG FYGGANIGPA RKPHVDWGPD GVRSILRNWS | 180 |
| HELADEAKDI IDAEDEAISL PGGIEENYKG RRWGLYNTWR PLKPVRRDPL ACVDFVSSKN | 240 |
| DKSAILLRKI PGIHGPCTVD ALFTPANPKH EWYWMSDQQP DDILFMKIFD SAHERDPKTI | 300 |
| AGGVHHCSFH HPGTEDEEVR ESLETKFMAF W | 331 |

SEQ ID NO: 21

| | |
|---|---|
| atgccacata aggatactcc attggaatct ccagttggta agaatgttac tgctaccatt | 60 |
| gcttatcatt ctggtccagc tttgccaact tctccaattg ctggtgttac tactttacaa | 120 |
| gattgcaccc aacaagttgt tgccgttact gatattagac catccgtttc ttcattcacc | 180 |
| ttggatggta atggtttcca agttgtcaaa catgcttctg ctgttggttc tcctccttac | 240 |
| aatcattctt cttggactga tccagtcgtc agaaaagaag tttacgatcc agaaattatc | 300 |
| gaattggcca agtctttgac tggtgccaaa aaggttatga ttttgttggc ctcttctagg | 360 |
| aacgtccctt ttaaagaacc agaattggct ccaccatatc caatgccagg taaatctaat | 420 |
| tccggttcta aagaaggtgg cgctaatcca gctaatgaat tgccaactac tagagctaag | 480 |
| ggtttccaaa aaggtgaaga agaaggtcca gttagaaaac cacacaaaga ttggggtcca | 540 |
| tctggtgctt ggaatacttt gagaaattgg tcccaagaat tgatcgatga agccggtgat | 600 |
| attatcaaag ctggtgatga agctgctaaa ttgccaggtg gtagagctaa gaattatcaa | 660 |
| ggtagaagat gggccttgta tacaacttgg aggccattga aaccagttaa gagggatcca | 720 |
| atggcttatg ttgattattg gactgctgat ggtgaagatg gtgtttcatt ttggagaaat | 780 |
| ccaccaggtg ttcatggtac ttttgaatcc gatgttttgt tgactaaggc taacccaaaa | 840 |
| cataagtggt actggatttc tgatcaaacc ccagatgaag tcttgttgat gaagattatg | 900 |
| gacaccgaat ctgaaaagga tggttctggt attgctggtg gtgttcatca ctgttctttt | 960 |
| catttgccag gtactgaaaa agaagaggtc agagaatcca tcgaaactaa gtttattgcc | 1020 |
| ttctggtaa | 1029 |

SEQ ID NO: 22

| | |
|---|---|
| MPHKDTPLES PVGKNVTATI AYHSGPALPT SPIAGVTTLQ DCTQQVVAVT DIRPSVSSFT | 60 |
| LDGNGFQVVK HASAVGSPPY NHSSWTDPVV RKEVYDPEII ELAKSLTGAK KVMILLASSR | 120 |
| NVPFKEPELA PPYPMPGKSN SGSKEGGANP ANELPTTRAK GFQKGEEEGP VRKPHKDWGP | 180 |
| SGAWNTLRNW SQELIDEAGD IIKAGDEAAK LPGGRAKNYQ GRRWALYTTW RPLKPVKRDP | 240 |
| MAYVDYWTAD GEDGVSFWRN PPGVHGTFES DVLLTKANPK HKWYWISDQT PDEVLLMKIM | 300 |
| DTESEKDGSG IAGGVHHCSF HLPGTEKEEV RESIETKFIA FW | 342 |

SEQ ID NO: 23

| | |
|---|---|
| atgccacatc aacaaactcc attggaatct ccagttggta agaatgttac tgctaccatt | 60 |
| gcttaccata atggtccagc tttgccaact tctccaattg ctggtgttac tactttggaa | 120 |
| gattgcaccc aacatgttgt tgctgttact gatattagac catccgtttc ttcattcacc | 180 |
| ttggatggta atggtttcca agttgttaag cacgtttccg aagtttcttc tcctccatac | 240 |
| aatcattctt catggactga tccagtcgtc agaaaagaag tttacgatcc agaaattatc | 300 |
| gaattggcca agtctgttac tggtgccaaa aaggttatga ttttgttggc ttctgctagg | 360 |
| aacgtccctt ttaaagaacc agaattggct ccaccatatc caatgccatc taaaggtggt | 420 |
| aaagaaggtg gcgctggtca aactgttcaa ggtcaacatg aattgccaac tactagagct | 480 |
| aagggttttc aaaagggtga agaagaaggt ccagttagaa aaccacataa ggattggggt | 540 |
| ccatctggtg cttggaatac tttgttgaat tggtcccaag aattgatcga tgaagccgat | 600 |
| gatattatca aggctggtga tgaagctgct gaattgccag gtggtagagc taagaattat | 660 |
| caaggtagaa gatgggcctt gtatacaact tggaggccat tgaaaccagt taagagggat | 720 |
| ccaatggctt ttgttgatta ttggactgct gatgaagagg acggtgtttc attttggaga | 780 |
| aatccaccag gtgttcatgg tacttttgaa tccgatgttt tgttgactag agctaaccca | 840 |
| aaacataagt ggtactggat ttctgatcaa accccagatg aagtcttgtt gatgaagatt | 900 |
| atggacaccg aatctgaaaa ggacggttct gatattgctg gtggtgttca ttactgttct | 960 |
| ttccatttgc cagtctccga aaaagaagaa gtcagagaat ccatcgaaac gaagtttatt | 1020 |
| gctttctggt aa | 1032 |

SEQ ID NO: 24

| | |
|---|---|
| MPHQQTPLES PVGKNVTATI AYHNGPALPT SPIAGVTTLE DCTQHVVAVT DIRPSVSSFT | 60 |
| LDGNGFQVVK HVSEVSSPPY NHSSWTDPVV RKEVYDPEII ELAKSVTGAK KVMILLASAR | 120 |
| NVPFKEPELA PPYPMPSKGG KEGGAGQTVQ GQHELPTTRA KGFQKGEEEG PVRKPHKDWG | 180 |
| PSGAWNTLLN WSQELIDEAD DIIKAGDEAA ELPGGRAKNY QGRRWALYTT WRPLKPVKRD | 240 |
| PMAFVDYWTA DEEDGVSFWR NPPGVHGTFE SDVLLTRANP KHKWYWISDQ TPDEVLLMKI | 300 |
| MDTESEKDGS DIAGGVHYCS FHLPVSEKEE VRESIETKFI AFW | 343 |

SEQ ID NO: 25

| | |
|---|---|
| atgccacaca aggataactt gttggaatct ccagttggta aatctgttac tgctaccatt | 60 |
| gcttatcatt ctggtccagc tttgccaact tctccaattg ctggtgttac tactttacaa | 120 |
| gattgcaccc aacaagctgt tgctgttact gatattagac catccgtttc ttcattcacc | 180 |
| ttggatggta atggtttcca agttgttaag cacacttctg ctgttggttc acctccatat | 240 |
| gatcattctt catggactga tccagtcgtc agaaaagaag tttacgatcc agaaattatc | 300 |
| gaattggcca agtctttgac tggtgccaaa aaggttatga ttttgttggc ctcttctagg | 360 |
| aacgtccctt ttaaagaacc agaattggct ccaccatatc caatgccagg taaatcttct | 420 |
| tcaggttcca aagaaagaga agctattcca gctaatgaat tgccaactac tagagctaag | 480 |
| ggtttccaaa aaggtgaaga agaaggtcca gttagaaagc cacataagga ttggggtcca | 540 |
| tctggtgctt ggaatacttt gagaaattgg tcccaagaat tgatcgatga agccggtgat | 600 |
| attatcaaag ctggtgatga agctgctaaa ttgccaggtg gtagagctaa gaattatcaa | 660 |
| ggtagaagat gggccttgta tacaacttgg aggccattga aaactgttaa gagggatcca | 720 |
| atggcttacg ttgattattg gactgctgat gaagaggatg gtgtttcatt ttggagaaat | 780 |
| ccaccaggtg ttcatggtac ttttgaatcc gatgttttgt tgactaaggc taacccaaaa | 840 |
| cataagtggt actggatttc tgatcaaacc ccagatgaag tcttgttgat gaagattatg | 900 |
| gacaccgaat ctgaaaagga cggttctgaa attgctggtg gtgttcatca ctgttctttt | 960 |
| catttgccag gtactgaaaa agaagaggtc agagaatcca tcgaaactaa gtttattgcc | 1020 |
| ttctggtaa | 1029 |

SEQ ID NO: 26

| | |
|---|---|
| MPHKDNLLES PVGKSVTATI AYHSGPALPT SPIAGVTTLQ DCTQQAVAVT DIRPSVSSFT | 60 |
| LDGNGFQVVK HTSAVGSPPY DHSSWTDPVV RKEVYDPEII ELAKSLTGAK KVMILLASSR | 120 |
| NVPFKEPELA PPYPMPGKSS SGSKEREAIP ANELPTTRAK GFQKGEEEGP VRKPHKDWGP | 180 |
| SGAWNTLRNW SQELIDEAGD IIKAGDEAAK LPGGRAKNYQ GRRWALYTTW RPLKTVKRDP | 240 |
| MAYVDYWTAD EEDGVSFWRN PPGVHGTFES DVLLTKANPK HKWYWISDQT PDEVLLMKIM | 300 |
| DTESEKDGSE IAGGVHHCSF HLPGTEKEEV RESIETKFIA FW | 342 |

SEQ ID NO: 27

| | |
|---|---|
| atggccgatc aagaaattac tactgctcca ccatcttctc cattggttcc attggatttt | 60 |
| tcttcatctc acgaaaccgt tccagaatcc catatttggg ttgattccat tgaattgtct | 120 |
| ccagctatgg atttggacga gaaattgtct ttgccagtta tcgatttgtt ggatgatacc | 180 |
| actgcctctg aattgattgg taaagcttgt caacaatggg gtatgttcca attgattaac | 240 |
| catggtgttc caaagtccat tattgccgaa actgaagatg aagctagaag gttgtttgct | 300 |
| ttgccaacta ctcaaaagat gaagactttt ggtccaggta atactggtta tggtatggtt | 360 |
| ccattgtcca agtaccattc taaatccatg tggcatgaag gtttcaccat ttttggttct | 420 |
| ccattggatg atgctaaaaa gttgtggcca tctgactaca agagattctg tgatgttatg | 480 |
| gaagaatacc aaagaaagat gaagggtttg gccgatagat tgatgagatt gatcttgaag | 540 |
| ttcttggaca tctccgaaga agagatcatg aagttgatgt tcactccaga ggattcctct | 600 |
| aaaatctaca ctgctttgag gttgaacttg tatccaccat gtccagatcc agatagagtt | 660 |
| gttggtatgg cttctcatac tgatacttca ttcttcacca ttatccacca agctagaaat | 720 |
| gatggcttgc aaatctttaa ggatgaagct ggttgggttc cattatctcc aacatctggt | 780 |
| actttgatgg ttaacgttgg tgacttgttg cagattttgt ctaatggtag attcccatcc | 840 |
| atcttgcaca gagttatgat ccaagaaaag atggaagata ggttgtcctt ggcttacttt | 900 |
| tacactccac caccacatat ctatattgct ccatactgta agccattgtc cgaatctcca | 960 |
| caaatcccat tatacagatg tgtcaccgtc aaagaatact ccacttctaa gtctaacaac | 1020 |
| aacttcaagg gtttgtctac cgtcaagatc tcctctttga tttga | 1065 |

SEQ ID NO: 28

| | |
|---|---|
| MADQEITTAP PSSPLVPLDF SSSHETVPES HIWVDSIELS PAMDLDEKLS LPVIDLLDDT | 60 |
| TASELIGKAC QQWGMFQLIN HGVPKSIIAE TEDEARRLFA LPTTQKMKTF GPGNTGYGMV | 120 |
| PLSKYHSKSM WHEGFTIFGS PLDDAKKLWP SDYKRFCDVM EEYQRKMKGL ADRLMRLILK | 180 |
| FLDISEEEIM KLMFTPEDSS KIYTALRLNL YPPCPDPDRV VGMASHTDTS FFTIIHQARN | 240 |
| DGLQIFKDEA GWVPLSPTSG TLMVNVGDLL QILSNGRFPS ILHRVMIQEK MEDRLSLAYF | 300 |
| YTPPPHIYIA PYCKPLSESP QIPLYRCVTV KEYSTSKSNN NFKGLSTVKI SSLI | 354 |

SEQ ID NO: 29

| | |
|---|---|
| atggcttcta ccttgtctca agttttcaga gataatccat tgccattgaa ccacatcatc | 60 |
| ccattggatt ttacctctgt tcattccttg ccagaatctc atgtttggcc agcttttgat | 120 |
| ggttttccat ttggtactac ttacccaggt gaaaagttct ccattccaat catcgatttg | 180 |
| atggatccaa atgctgctca attggttggt catgcttgtg aaaaatgggg tgcttttcaa | 240 |
| ttgacttctc atggtttgcc atccatcttg actgatgatg ttgaatctca aaccagaagg | 300 |
| ttgtttgctt tgccagctca cgaaaaaatg aaggctttga gattgccatc tggtggtact | 360 |
| ggttatggtc aagctagaat ttctccattc tacccaaagt tcatgtggca tgaaggtttc | 420 |
| actattatgg gttctgctgt tgatcatgct agaaaattgt ggccagatga ttacaagggt | 480 |
| ttctgtgatg ttatggaaga ttaccaaaag aagatgaagg aattggccga atccttgttg | 540 |
| catatcttct tggaatcctt ggacatctcc aaagaagagt acagatctac cactattcaa | 600 |
| agaggtcata aggcttgtaa taccgccttg caattgaatt cttatccacc atgtccagat | 660 |
| ccaaatagag ctatgggttt ggctccacat actgattctt tgttgttcac catcgttcat | 720 |
| caatctcaca cctccggttt acaaattttg agagatggtg ttggttggat cactgttttt | 780 |
| ccattggaag gtgctttggt tgttaacgtt ggtgatttgt tgcacatctt gtctaatggt | 840 |
| agatacccat ctgttttaca cagagccgtt gttaatcaag ccgaacacag aatttctttg | 900 |
| gcttactttt atggtccacc agccgattct ttgatttctc cattgtgtaa cttggtttct | 960 |
| tccggtcaac aagttgttgc tccaagatat agatccgtgt ctgtcaaaga atacgtcgat | 1020 |
| ttgaaagaga agcacaaaga aaaggccttg tccttgttga gattgtga | 1068 |

SEQ ID NO: 30

| | |
|---|---|
| MASTLSQVFR DNPLPLNHII PLDFTSVHSL PESHVWPAFD GFPFGTTYPG EKFSIPIIDL | 60 |
| MDPNAAQLVG HACEKWGAFQ LTSHGLPSIL TDDVESQTRR LFALPAHEKM KALRLPSGGT | 120 |
| GYGQARISPF YPKFMWHEGF TIMGSAVDHA RKLWPDDYKG FCDVMEDYQK KMKELAESLL | 180 |
| HIFLESLDIS KEEYRSTTIQ RGHKACNTAL QLNSYPPCPD PNRAMGLAPH TDSLLFTIVH | 240 |
| QSHTSGLQIL RDGVGWITVF PLEGALVVNV GDLLHILSNG RYPSVLHRAV VNQAEHRISL | 300 |
| AYFYGPPADS LISPLCNLVS SGQQVVAPRY RSVSVKEYVD LKEKHKEKAL SLLRL | 355 |

SEQ ID NO: 31

| | |
|---|---|
| atgtccatgg ttgtccaaca agaacaagaa gttgtttttg acgctgctgt tttgtctggt | 60 |
| caaactgaaa ttccatccca attcatttgg ccagctgaag aatctccagg ttctgttgct | 120 |
| gttgaagaat tggaagttgc cttgattgat gttggtgctg gtgctgaaag atcttctgtt | 180 |
| gttagacaag ttggtgaagc ttgtgaaaga cacggttttt tcttggttgt taaccatggt | 240 |
| attgaagccg ctttgttgga agaggctcat agatgtatgg atgctttttt cactttgcca | 300 |
| ttgggtgaaa aacaaagagc acagagaagg gctggtgaat cttgtggtta tgcttcatct | 360 |
| tttactggta gattcgcttc taagttgcca tggaaagaaa ctttgtcctt cagatattct | 420 |
| tccgctggtg atgaagaagg tgaagagggc gttggtgaat atttggttag aaaattgggt | 480 |
| gccgaacacg gtagaagatt gggtgaagtt tattctagat actgccacga aatgtccagg | 540 |
| ttgtctttgg aattgatgga agttttgggt gagtctttgg gtatagttgg tgatagaagg | 600 |
| cattacttca gaagattctt ccagagaaac gactccatca tgagattgaa ttattaccca | 660 |
| gcttgccaaa gaccattgga tactttgggt actggtccac attgtgatcc aacatctttg | 720 |
| actatcttgc accaagatca tgttggtggt ttggaagttt gggctgaggg aaggtggaga | 780 |
| gctattagac caagaccagg tgctttggtt gttaatgttg gtgatacttt catggctttg | 840 |
| tccaacgcta gatatagatc ttgcttgcat agagccgttg ttaattctac tgctccaaga | 900 |
| agatctttgg cattcttttt gtgtccagaa atggataccg ttgttagacc acctgaagaa | 960 |
| ttggttgatg atcaccatcc aagagtttac ccagatttta cttggagagc tttgttggat | 1020 |
| ttcacccaaa gacattacag agctgatatg aggttgttcc aagctttttc tgattggttg | 1080 |
| aaccatcata gacacttgca acctactatc tactcctga | 1119 |

SEQ ID NO: 32

| | |
|---|---|
| MSMVVQQEQE VVFDAAVLSG QTEIPSQFIW PAEESPGSVA VEELEVALID VGAGAERSSV | 60 |
| VRQVGEACER HGFFLVVNHG IEAALLEEAH RCMDAFFTLP LGEKQRAQRR AGESCGYASS | 120 |
| FTGRFASKLP WKETLSFRYS SAGDEEGEEG VGEYLVRKLG AEHGRRLGEV YSRYCHEMSR | 180 |
| LSLELMEVLG ESLGIVGDRR HYFRRFFQRN DSIMRLNYYP ACQRPLDTLG TGPHCDPTSL | 240 |
| TILHQDHVGG LEVWAEGRWR AIRPRPGALV VNVGDTFMAL SNARYRSCLH RAVVNSTAPR | 300 |
| RSLAFFLCPE MDTVVRPPEE LVDDHHPRVY PDFTWRALLD FTQRHYRADM RLFQAFSDWL | 360 |
| NHHRHLQPTI YS | 372 |

SEQ ID NO: 33

| | |
|---|---|
| atggattctt ccgcttctac cattttgatg ccaccaccat tggaattgaa agacgaaaga | 60 |
| aaaaagggct ccgttgtttt cgattcctct aagatgcaaa agcaagaaaa gttgccaacc | 120 |
| gaattcattt ggccagatgc tgatttggtt agagcacaac aagaattgaa cgaaccattg | 180 |
| atcgatttgg acggtttttt caaaggtgat gaagctgcta ctgctcatgc tgctgaattg | 240 |
| attagaatgg cttgtttgaa ccacggtttc ttccaagtta ctaatcacgg tgttgatttg | 300 |
| gatttgatta gagctgctca agaagatatg ggcgcttttt tcaaattgcc attgtccaga | 360 |
| aagttgtccg tcaaaaaaaa gccaggtgaa ttgtctggtt attctggtgc tcatgctgat | 420 |
| agatacactt ctaaattgcc atggaaagaa accttgtcct tcgtttactg ttacgactct | 480 |
| ggttctaaac ctatggttgc tgattacttc aaaaccgctt tgggtgaaga tttcgaacaa | 540 |
| attggttgga tctaccaaaa gtactgcgac gctttgaaag aattgtcctt gggtatcatg | 600 |
| cagttgttgg ctatttcttt ggatgtcgac tcttcctact acagaaagtt gtttgaagat | 660 |
| ggttactcca tcatgaggtg taattcttac ccaccatgta aagaagctgg tttggttatg | 720 |
| ggtactggtc cacattgtga tccagttgct ttgaccattt tacaccaaga tcaagtcaag | 780 |
| ggtttggaag ttttcgttga taacaaatgg caatccgtta agccaagacc aggtgctttg | 840 |
| gttgttaata ttggtgatac tttcatggcc ttgtctaacg gcaagtacaa gtcttgtatt | 900 |
| catagagccg ttgtcaacat ggacaaagaa agaagatctt tgaccttctt catgtcccca | 960 |
| aaggatgata aggttgtttc tccaccacaa gaattgatcg ttagagaagg tcctagaaag | 1020 |
| tacccagatt ttaagtggtc tgagttgttg gaattcaccc aaaaacatta cagaccaaac | 1080 |
| aacgacacct tgcaatcttt tgttgagtgg agattatctt cccagaccaa gtaa | 1134 |

SEQ ID NO: 34

| | |
|---|---|
| MDSSASTILM PPPLELKDER KKGSVVFDSS KMQKQEKLPT EFIWPDADLV RAQQELNEPL | 60 |
| IDLDGFFKGD EAATAHAAEL IRMACLNHGF FQVTNHGVDL DLIRAAQEDM GAFFKLPLSR | 120 |
| KLSVKKKPGE LSGYSGAHAD RYTSKLPWKE TLSFVYCYDS GSKPMVADYF KTALGEDFEQ | 180 |
| IGWIYQKYCD ALKELSLGIM QLLAISLDVD SSYYRKLFED GYSIMRCNSY PPCKEAGLVM | 240 |
| GTGPHCDPVA LTILHQDQVK GLEVFVDNKW QSVKPRPGAL VVNIGDTFMA LSNGKYKSCI | 300 |
| HRAVVNMDKE RRSLTFFMSP KDDKVVSPPQ ELIVREGPRK YPDFKWSELL EFTQKHYRPN | 360 |
| NDTLQSFVEW RLSSQTK | 377 |

SEQ ID NO: 35

| | |
|---|---|
| atggctacta ctattgccga cgtttttaag tctttcccag ttcatattcc agcccacaag | 60 |
| aatttggatt tcgattcctt gcatgaattg ccagattctt acgcttggat tcaaccagat | 120 |
| tcttttccat ctccaactca taagcaccac aactccattt tggattccga ttctgattcc | 180 |
| gttccattga tcgatttgtc tttgccaaat gctgctgctt tgattggtaa tgcttttaga | 240 |
| tcttggggtg ccttccaagt tattaaccat ggtgttccaa tttctttgtt gcaatccatt | 300 |
| gaatcctctg ccgatacttt gttttctttg ccaccatctc ataagttgaa ggctgctaga | 360 |
| actccagatg gtatttctgg ttatggtttg gtcagaatct cttcattctt cccaaaaagg | 420 |
| atgtggtctg aaggttttac tatagtcggt tctccattgg atcacttcag acaattgtgg | 480 |
| ccacatgatt accacaaaca ttgcgaaatc gttgaagaat acgacaggga aatgagatct | 540 |
| ttgtgtggta gattgatgtg gttgggtttg ggtgaattgg gtattactag agatgatatg | 600 |
| aagtgggctg gtccagatgg tgattttaag acttctccag ctgctactca attcaactct | 660 |
| tatccagttt gtccagatcc agatagagct atgggtttgg gtccacatac tgatacttca | 720 |
| ttattgacca tcgtctacca gtctaacacc agaggtttac aagttttgag agaaggtaag | 780 |
| agatgggtta ctgttgaacc agttgctggt ggtttggttg ttcaagttgg tgatttgttg | 840 |
| catattttga ccaatggctt gtacccatct gctttacatc aagctgttgt taacagaacc | 900 |
| agaaagagat tgtctgttgc ttacgttttt ggtccaccag aatctgctga aatttctcca | 960 |
| ttgaaaaagt tgttgggtcc aactcaacca ccattataca gaccagttac ttggactgaa | 1020 |
| tacttgggta aaaaggccga acatttcaac aacgctttgt ctactgttag attgtgtgct | 1080 |
| ccaattaccg gtttgttgga tgttaacgat cactccagag ttaaggttgg ttga | 1134 |

SEQ ID NO: 36

| | |
|---|---|
| MATTIADVFK SFPVHIPAHK NLDFDSLHEL PDSYAWIQPD SFPSPTHKHH NSILDSDSDS | 60 |
| VPLIDLSLPN AAALIGNAFR SWGAFQVINH GVPISLLQSI ESSADTLFSL PPSHKLKAAR | 120 |
| TPDGISGYGL VRISSFFPKR MWSEGFTIVG SPLDHFRQLW PHDYHKHCEI VEEYDREMRS | 180 |
| LCGRLMWLGL GELGITRDDM KWAGPDGDFK TSPAATQFNS YPVCPDPDRA MGLGPHTDTS | 240 |
| LLTIVYQSNT RGLQVLREGK RWVTVEPVAG GLVVQVGDLL HILTNGLYPS ALHQAVVNRT | 300 |
| RKRLSVAYVF GPPESAEISP LKKLLGPTQP PLYRPVTWTE YLGKKAEHFN NALSTVRLCA | 360 |
| PITGLLDVND HSRVKVG | 377 |

SEQ ID NO: 39

| | |
|---|---|
| atgcacgttg ttacttctac acctgaagct agacatgatg gtgcaccttt ggtttttgat | 60 |
| gcttctgttt tgagacacca acacaacatt ccaaagcaat tcatttggcc agatgaagaa | 120 |
| aaaccagctg ctacttgtcc agaattggaa gttccattga ttgacttgtc tggtttcttg | 180 |
| tctggtgaaa aagatgctgc tgctgaagct gttagattgg ttggtgaagc ttgtgaaaaa | 240 |
| cacggttttt tcttggttgt taaccacggt gttgacagaa agttgattgg tgaagctcat | 300 |
| aagtacatgg acgaattctt tgagttgcca ttgtcccaaa aacaatccgc tcaaagaaaa | 360 |
| gctggtgaac attgtggtta cgcttcatct tttactggta ggttctcttc taaattgcca | 420 |
| tggaaagaaa ccttgtcctt tagatttgct gccgacgaat ctttgaacaa cttggtcttg | 480 |
| cattacttga acgataagtt gggtgatcaa ttcgctaagt tcggtagagt ttaccaagat | 540 |
| tactgtgaag ctatgtccgg tttgtctttg ggtatcatgg aattgctagg taagtctttg | 600 |
| ggtgttgaag aacaatgctt caagaacttc ttcaaggaca acgactccat catgagattg | 660 |
| aatttttacc caccatgcca aaagccacat ttgactttgg gtactggtcc acattgtgat | 720 |
| ccaacatctt tgactatctt gcaccaagat caagtcggtg gtttacaagt ttttgttgat | 780 |
| aaccagtgga gattgatcac cccaaatttt gatgctttcg ttgttaacat cggtgatacc | 840 |
| tttatggctt tgtctaacgg tagatacaag tcctgcttgc atagagctgt tgttaactct | 900 |
| gaaagaacga gaaagtcttt ggcattcttc ttgtgtccaa gaaacgataa ggttgttaga | 960 |
| ccaccaagag aattggttga tactcaaaac ccaagaagat acccagattt cacttggtct | 1020 |
| atgttgttga gattcaccca aactcattac agagctgata tgaagacttt ggaagctttt | 1080 |
| tctgcttggt tgcaacaaga acaacaagag cagcaagaac aacagttcaa catctga | 1137 |

SEQ ID NO: 40

| | |
|---|---|
| MHVVTSTPEA RHDGAPLVFD ASVLRHQHNI PKQFIWPDEE KPAATCPELE VPLIDLSGFL | 60 |
| SGEKDAAAEA VRLVGEACEK HGFFLVVNHG VDRKLIGEAH KYMDEFFELP LSQKQSAQRK | 120 |
| AGEHCGYASS FTGRFSSKLP WKETLSFRFA ADESLNNLVL HYLNDKLGDQ FAKFGRVYQD | 180 |
| YCEAMSGLSL GIMELLGKSL GVEEQCFKNF FKDNDSIMRL NFYPPCQKPH LTLGTGPHCD | 240 |
| PTSLTILHQD QVGGLQVFVD NQWRLITPNF DAFVVNIGDT FMALSNGRYK SCLHRAVVNS | 300 |
| ERTRKSLAFF LCPRNDKVVR PPRELVDTQN PRRYPDFTWS MLLRFTQTHY RADMKTLEAF | 360 |
| SAWLQQEQQE QQEQQFNI | 378 |

SEQ ID NO: 41

| | |
|---|---|
| atggctaccg aatgtattgc tactgttcca caaatcttct ccgagaacaa gaccaaagaa | 60 |
| gattcctcta ttttcgacgc caagttgttg aatcaacatt cccatcatat cccacaacaa | 120 |
| ttcgtttggc cagatcacga aaaaccatct actgatgttc aaccattgca agttccattg | 180 |
| attgatttgg ctggtttctt gtctggtgat tcttgtttgg cttctgaagc tactagattg | 240 |
| gtttctaaag ctgctaccaa acacggcttt ttcttgatta ctaatcacgg tgttgacgaa | 300 |
| tccttgttgt ctagagctta cttgcatatg gactcatttt tcaaagctcc agcttgcgaa | 360 |
| aaacaaaagg ctcaaagaaa atggggtgaa tcttctggtt acgcttcttc atttgttggc | 420 |
| agattctctt ctaaattgcc atggaaagaa accttgtcct tcaagttttc tccagaagaa | 480 |
| aagatccatt cccaaaccgt taaggacttc gtgtctaaaa agatgggtga tggttacgaa | 540 |
| gatttcggta aggtttatca agaatacgct gaagctatga acaccttgtc cttgaagatc | 600 |
| atggaattgc taggtatgtc tttgggtgtc gaaagaaggt acttcaaaga attcttcgag | 660 |
| gactccgatt ccatcttcag attgaattat tacccacaat gcaagcaacc agaattggct | 720 |
| ttgggtactg gtccacattg tgatccaaca tctttgacta tcttgcacca agatcaagtc | 780 |
| ggtggtttac aagttttcgt tgataacaag tggcaatcca ttccaccaaa tccacatgct | 840 |
| ttcgttgtta acattggtga tactttcatg gctttgacca acggtagata caaatcttgc | 900 |
| ttgcatagag ccgttgtcaa ctctgaaaga gaaagaaaga ctttcgcatt cttcttgtgt | 960 |
| ccaaagggtg aaaaagttgt taagccacct gaagaattgg ttaacggtgt taagtctggt | 1020 |
| gaaagaaagt acccagattt cacttggtct atgttcttgg aattcaccca aaaacattac | 1080 |
| agagccgaca tgaacacttt ggacgaattt tctatttggt tgaagaacag aagatccttt | 1140 |
| taa | 1143 |

SEQ ID NO: 42

| | |
|---|---|
| MATECIATVP QIFSENKTKE DSSIFDAKLL NQHSHHIPQQ FVWPDHEKPS TDVQPLQVPL | 60 |
| IDLAGFLSGD SCLASEATRL VSKAATKHGF FLITNHGVDE SLLSRAYLHM DSFFKAPACE | 120 |
| KQKAQRKWGE SSGYASSFVG RFSSKLPWKE TLSFKFSPEE KIHSQTVKDF VSKKMGDGYE | 180 |
| DFGKVYQEYA EAMNTLSLKI MELLGMSLGV ERRYFKEFFE DSDSIFRLNY YPQCKQPELA | 240 |
| LGTGPHCDPT SLTILHQDQV GGLQVFVDNK WQSIPPNPHA FVVNIGDTFM ALTNGRYKSC | 300 |
| LHRAVVNSER ERKTFAFFLC PKGEKVVKPP EELVNGVKSG ERKYPDFTWS MFLEFTQKHY | 360 |
| RADMNTLDEF SIWLKNRRSF | 380 |

SEQ ID NO: 43

| | |
|---|---|
| atgccatcta gaccatcaag agtcgtcaaa gaacaacatc caactaagaa gtccttcttg | 60 |
| gacttggaat ctttgaacga attgccagat tcttttgctt ggggttcttt tgaagatcca | 120 |
| tgctctattg ataacccatc tggttatggt ccagattctg ttccagttat caacttgcaa | 180 |
| gatccacaag ctcaacaatt ggttggtttg gcttgtagat cttggggtgt tttccaagtt | 240 |
| accaaccatg gtattcaaaa gtccttgttg gatgatattg aagctgctgg taagtctttg | 300 |
| tttgccttgc cagttaatca aaagttgaag gctgctagat cttcttgtgg tgttactggt | 360 |
| tacggtccag ctggtatttc ttcatttttc ccaaaaagga tgtggtccga aggtttcact | 420 |
| attttgggtt ctccattgga tcatgctaga caattgtggc caaacaacta caacaagttc | 480 |
| tgcgatatca tcgaaaagta ccaaaaagaa atgaaccagt tggccaaaaa gttgatgcaa | 540 |
| ttggttgttg gttccttggg tatttccaac caggatatta tgaattgggc cgatttgttg | 600 |
| gaaggtgcta atggtgctat gcaattgaac tcttatccaa tcagaccaga tccaaataga | 660 |
| gctatgggtt tggctgctca tactgattct actttgttga ccatcttgca ccaatctaac | 720 |
| actaccggtt tacaggtttt cagagaaaga tctggttggg ttactgttcc accaatttct | 780 |
| ggtggtttgg ttattaacat cggtgacttg ttgcacatct tgtctaatgg tagataccca | 840 |
| tccgtttacc atagagccat ggttaataga gttcagcaca gattgtctgt tgcttacttg | 900 |
| tatggtccag cttcaggtgt tagagttcaa ccattgccaa aattgattga tgctactcac | 960 |
| ccaccattat acagaccagt tacttggtct gaatacttgg gtatcaagtc tgaacatttg | 1020 |
| accaaggcct tgtccttgat tagaatcaac cataacacta acccatcctt gactggtttg | 1080 |
| attggtaatg atgaacctaa gtccatcaac gttgactccg ataagactat tttggctgtt | 1140 |
| ttcggttaa | 1149 |

SEQ ID NO: 44

| | |
|---|---|
| MPSRPSRVVK EQHPTKKSFL DLESLNELPD SFAWGSFEDP CSIDNPSGYG PDSVPVINLQ | 60 |
| DPQAQQLVGL ACRSWGVFQV TNHGIQKSLL DDIEAAGKSL FALPVNQKLK AARSSCGVTG | 120 |
| YGPAGISSFF PKRMWSEGFT ILGSPLDHAR QLWPNNYNKF CDIIEKYQKE MNQLAKKLMQ | 180 |
| LVVGSLGISN QDIMNWADLL EGANGAMQLN SYPIRPDPNR AMGLAAHTDS TLLTILHQSN | 240 |
| TTGLQVFRER SGWVTVPPIS GGLVINIGDL LHILSNGRYP SVYHRAMVNR VQHRLSVAYL | 300 |
| YGPASGVRVQ PLPKLIDATH PPLYRPVTWS EYLGIKSEHL TKALSLIRIN HNTNPSLTGL | 360 |
| IGNDEPKSIN VDSDKTILAV FG | 382 |

SEQ ID NO: 45

| | |
|---|---|
| atgaagtaca ccacctgtca gatgaacatt tttccatctt tgtggtccat gaagaccagt | 60 |
| tttagatggc caagaacttc taagtggtcc tctgtttcat tatacgacat gatgttgaga | 120 |
| accgttgctt tgttgtctgg tagagctttt gttggtttgc cattgtgtag agatgaaggt | 180 |
| tggttgcaag cttctattgg ttacactgtt caatgcgtgt ctatcagaga tcagttgttt | 240 |
| acttggtccc cagttttgag gccaattatt ggtccatttt tgccatccgt tagatctgtt | 300 |
| agaaggcatt tgagattcgc tgctgaaatt atggctccat tgatttctca agccttgcaa | 360 |
| gacgaaaaac aacatagagc tgataccttg ttggctgatc aaactgaagg tagaggtact | 420 |
| ttcatttcct ggttgttgag acatttgcca gaagaattga gaaccccaga acaagttggt | 480 |
| ttggatcaaa tgttggtttc ctttgctgct attcatacca ctactatggc tttgacaaag | 540 |
| gttgtttggg aattggtaaa aaggccagag tacattgaac cattgagaac cgaaatgcaa | 600 |
| gatgtttttg gtccagatgc tgtttctcca gatatctgca ttaacaaaga agccttgtcc | 660 |
| agattgcaca agttggattc tttcatcaga gaagttcaaa gatggtgtcc atctactttc | 720 |
| gttactccat ctagaagagt catgaagtct atgactttgt ccaacggtat caagttgcaa | 780 |
| agaggtactt ctattgcttt tccagctcat gccattcaca tgtctgaaga aactccaaca | 840 |
| ttttccccag atttctcttc cgattttgaa aacccatccc caagaatttt cgacggtttt | 900 |
| agatacttga acttgaggtc cattaagggt caaggttcac aacatcaagc tgctactact | 960 |
| ggtccagatt acttgatttt caatcatggt aaacatgcct gcccaggtag attttttgct | 1020 |
| atctctgaaa tcaagatgat tttgatcgag ttgttggcca agtacgactt cagattggaa | 1080 |
| gatggtaaac caggtccaga attgatgaga gttggtactg aaactagatt ggataccaaa | 1140 |
| gctggtttgg aaatgagaag aaggtga | 1167 |

SEQ ID NO: 46

| | |
|---|---|
| MKYTTCQMNI FPSLWSMKTS FRWPRTSKWS SVSLYDMMLR TVALLSGRAF VGLPLCRDEG | 60 |
| WLQASIGYTV QCVSIRDQLF TWSPVLRPII GPFLPSVRSV RRHLRFAAEI MAPLISQALQ | 120 |
| DEKQHRADTL LADQTEGRGT FISWLLRHLP EELRTPEQVG LDQMLVSFAA IHTTTMALTK | 180 |
| VVWELVKRPE YIEPLRTEMQ DVFGPDAVSP DICINKEALS RLHKLDSFIR EVQRWCPSTF | 240 |
| VTPSRRVMKS MTLSNGIKLQ RGTSIAFPAH AIHMSEETPT FSPDFSSDFE NPSPRIFDGF | 300 |
| RYLNLRSIKG QGSQHQAATT GPDYLIFNHG KHACPGRFFA ISEIKMILIE LLAKYDFRLE | 360 |
| DGKPGPELMR VGTETRLDTK AGLEMRRR | 388 |

SEQ ID NO: 47

| | |
|---|---|
| atggccgaat tggatacctt ggatatcgtt gttttgggtg ttatcttctt gggtactgtt | 60 |
| gcttacttca ccaaaggtaa attgtggggt gttactaagg atccatacgc taatggtttt | 120 |
| gctgctggtg gtgcttctaa accaggtaga actagaaata tcgttgaagc catggaagaa | 180 |
| tctggtaaga actgtgttgt tttctacggt tctcaaactg gtactgctga agattatgct | 240 |
| tccagattgg ctaaagaagg taagagtaga ttcggtttga acaccatgat tgccgatttg | 300 |
| gaagattacg atttcgataa cttggatacc gtcccatctg ataacatcgt tatgtttgtt | 360 |
| ttggctacct acggtgaagg tgaacctact gataatgctg ttgacttcta cgaattcatt | 420 |
| accggtgaag atgcttcttt caacgaaggt aatgatccac cattgggtaa cttgaattac | 480 |
| gttgcttttg gtttgggtaa caacacctac gaacattaca actccatggt tagaaacgtc | 540 |
| aacaaggctt tggaaaaatt gggtgctcat agaattggtg aagctggtga aggtgatgat | 600 |
| ggtgctggta ctatggaaga agattttttg gcttggaaag acccaatgtg ggaagccttg | 660 |
| gctaaaaaga tgggtttgga agaaagagaa gctgtctacg aacctatttt cgccattaac | 720 |
| gaaagagatg atttgacccc tgaagccaat gaagtttatt tgggtgaacc taacaagttg | 780 |
| cacttggaag gtactgctaa aggtccattc aattctcaca acccatatat tgctccaatc | 840 |
| gccgaatctt acgaattatt ctctgctaag gatagaaact gcttgcacat ggaaattgac | 900 |
| atctctggtt ctaatttgaa gtacgaaacc ggtgatcata ttgccatttg gccaactaat | 960 |
| ccaggtgaag aagttaacaa gttcttggac atcttggact tgtccggtaa acaacattct | 1020 |
| gttgttactg ttaaggcctt ggaacctaca gctaaagttc cttttccaaa tccaactacc | 1080 |
| tacgatgcca ttttgagata ccatttggaa atttgcgctc cagtctctag acaattcgtt | 1140 |
| tctactttgg ctgcttttgc tccaaacgat gatattaagg ctgaaatgaa cagattgggt | 1200 |
| tccgataagg attacttcca cgaaaaaact ggtccacact actacaacat tgctagattt | 1260 |
| ttggcctctg tctctaaagg tgaaaagtgg actaagattc cattctccgc tttcattgaa | 1320 |
| ggtttgacta agttgcaacc tagatattac tccatctcct cctcatcttt ggttcaacct | 1380 |
| aagaagatct ctattaccgc cgttgttgaa tcccaacaaa ttccaggtag agatgatcct | 1440 |
| tttagaggtg ttgctaccaa ttacttgttc gccttgaaac aaaagcaaaa cggtgatcca | 1500 |
| aatcctgctc catttggtca atcttatgaa ttgactggtc caagaaacaa gtacgatggt | 1560 |
| attcatgttc cagttcacgt tagacactct aactttaagt tgccatctga tccaggtaag | 1620 |
| ccaattatca tgattggtcc aggtactggt gttgctccat tcagaggttt tgttcaagaa | 1680 |
| agagctaagc aagctagaga tggtgttgaa gttggtaaaa ccttgttgtt cttcggttgt | 1740 |
| agaaagtcca ctgaagattt catgtaccaa aaagaatggc aagaatacaa agaagcctta | 1800 |
| ggtgacaagt tcgaaatgat tactgccttc tcaagagaag gttctaagaa ggtttacgtc | 1860 |
| caacacagat tgaaagaaag atccaaagaa gtctccgatt tgttgtctca aaaggcctac | 1920 |
| ttttacgttt gtggtgatgc tgctcatatg gccagagaag ttaatactgt tttggcccaa | 1980 |
| attatcgctg aaggtagagg tgtatctgaa gctaagggtg aagaaatcgt taagaacatg | 2040 |
| agatccgcca atcaatacca agtttgctct gattttgtta ccttgcactg taaagaaacc | 2100 |
| acctacgcta attccgaatt gcaagaagat gtttggtcct aa | 2142 |

SEQ ID NO: 48

| | |
|---|---|
| MAELDTLDIV VLGVIFLGTV AYFTKGKLWG VTKDPYANGF AAGGASKPGR TRNIVEAMEE | 60 |
| SGKNCVVFYG SQTGTAEDYA SRLAKEGKSR FGLNTMIADL EDYDFDNLDT VPSDNIVMFV | 120 |
| LATYGEGEPT DNAVDFYEFI TGEDASFNEG NDPPLGNLNY VAFGLGNNTY EHYNSMVRNV | 180 |
| NKALEKLGAH RIGEAGEGDD GAGTMEEDFL AWKDPMWEAL AKKMGLEERE AVYEPIFAIN | 240 |
| ERDDLTPEAN EVYLGEPNKL HLEGTAKGPF NSHNPYIAPI AESYELFSAK DRNCLHMEID | 300 |
| ISGSNLKYET GDHIAIWPTN PGEEVNKFLD ILDLSGKQHS VVTVKALEPT AKVPFPNPTT | 360 |
| YDAILRYHLE ICAPVSRQFV STLAAFAPND DIKAEMNRLG SDKDYFHEKT GPHYYNIARF | 420 |
| LASVSKGEKW TKIPFSAFIE GLTKLQPRYY SISSSSLVQP KKISITAVVE SQQIPGRDDP | 480 |
| FRGVATNYLF ALKQKQNGDP NPAPFGQSYE LTGPRNKYDG IHVPVHVRHS NFKLPSDPGK | 540 |
| PIIMIGPGTG VAPFRGFVQE RAKQARDGVE VGKTLLFFGC RKSTEDFMYQ KEWQEYKEAL | 600 |
| GDKFEMITAF SREGSKKVYV QHRLKERSKE VSDLLSQKAY FYVCGDAAHM AREVNTVLAQ | 660 |
| IIAEGRGVSE AKGEEIVKNM RSANQYQVCS DFVTLHCKET TYANSELQED VWS | 713 |

SEQ ID NO: 49

| | |
|---|---|
| atggccgaac aacaaatctc caacttgttg tctatgttca acgccttcca taccaatcag | 60 |
| aagttggaaa tctctgttca agttaccgat tccttccagt atagagatac tcctccagat | 120 |
| tcttcatctt ctgaaggtgg ttctttgtcc agatacgaag aaagaagagt ttctttgcca | 180 |
| ttggctagaa attctccatc tccagatatc gttttccagt tgtgtttttc taccgccacc | 240 |
| atttctgaat tgaaccatag atggaagtcc cagagattga aagttgctga ttctccatac | 300 |
| aactacatct tgactttgcc atccaaaggt attagaggtg ccttcattga ttctttgaac | 360 |
| gtttggttgg atgttccaga agataaggcc caagttatca aggatgttat cgatatgttg | 420 |
| cacaactcct cattgatcat cgatgacttt caagatggtt ccccattgag aagaggtaaa | 480 |
| ccatctactc atactgtttt tggtccagct caagctatta acactgctac ctacattatc | 540 |
| gttaaggcca tcgaaagaat ccaagagatc gtttctcatg atgctttggc tgatattacc | 600 |
| ggtactatta ccactatctt tcaaggtcaa gctatggatt tgtggtggac tgctaacacc | 660 |
| atattgcaat ccattcaaga atacttgttg atggtcaacg ataagactgg tgctttgttc | 720 |
| agattgtctt tggaattatt ggccttgaac tccgaagctc caatttctga ttctaccttg | 780 |
| gaatccttgt cctccgttgt ttctttgttg ggtcaatact tccaaatcag ggatgactac | 840 |
| atgaacttga tcgataacaa gtacaccgac caaaagggtt tctgtgaaga tttggatgag | 900 |
| ggcaaatact ccttgacttt gattcatgct ttacaaaccg actcctccga tttgttgatt | 960 |
| aacgttttgt ccatgagaag agtccaaggt aaattgacta cccaacaaaa gatgttggtc | 1020 |
| ttggaagtta tgaagaccaa cggttctttg gattggactt ctaagttgtt gggtatgttg | 1080 |
| catacaagag ttgttgccga aatcgactcc ttggaaattt ctatgaagag agataaccca | 1140 |
| gctttgagag ctttggttga aagattgaag ccagaaacct ga | 1182 |

SEQ ID NO: 50

| | |
|---|---|
| MAEQQISNLL SMFNAFHTNQ KLEISVQVTD SFQYRDTPPD SSSSEGGSLS RYEERRVSLP | 60 |
| LARNSPSPDI VFQLCFSTAT ISELNHRWKS QRLKVADSPY NYILTLPSKG IRGAFIDSLN | 120 |
| VWLDVPEDKA QVIKDVIDML HNSSLIIDDF QDGSPLRRGK PSTHTVFGPA QAINTATYII | 180 |
| VKAIERIQEI VSHDALADIT GTITTIFQGQ AMDLWWTANT ILQSIQEYLL MVNDKTGALF | 240 |
| RLSLELLALN SEAPISDSTL ESLSSVVSLL GQYFQIRDDY MNLIDNKYTD QKGFCEDLDE | 300 |
| GKYSLTLIHA LQTDSSDLLI NVLSMRRVQG KLTTQQKMLV LEVMKTNGSL DWTSKLLGML | 360 |
| HTRVVAEIDS LEISMKRDNP ALRALVERLK PET | 393 |

SEQ ID NO: 51

| | |
|---|---|
| atgaagggtt tggttgttgt tggtgcttct tatgctggtg ttcaagctgc tttgactgct | 60 |
| agagatgctg gttttgctaa acctattgct atcgttggtg atgaaccatg tttgccatat | 120 |
| caaagaccac cattgtctaa ggattacttg ttggataacg cctccgaaca atctttgttc | 180 |
| ttgagagata atgctttctt cggtgccaag ggtattgaat tgattttggg ttccagagtt | 240 |
| atcgacatcg atttgagaga tagaagggcc attttggaaa gaggttctgt tttgggtttc | 300 |
| gagcaattgg ttattgctgc tggttctaga gctagaagat tggaagttcc aggtggtcat | 360 |
| ttggaaggtg tttgttattt gagatccttg tctgatgctg cccatttgaa aatgagattg | 420 |
| aagcaagctg aagatgtcgt tattattggt ggtggtttca tcggtttgga agttgctgct | 480 |
| tctgctacaa aattgggtaa gaaggttgtt ttgattgaag ccggtcacag attattggaa | 540 |
| agagctactt ctccagttgt ctcctctttt ttgttggatg ctcatttgag agccggtgtt | 600 |
| gaaattagat tgctagaaac tgttgctgct ttcgaaggtg ctagaggtaa attgtctact | 660 |
| gtcttgttat cctccggttc caaagttaga gctgatatgg ttgttgtagg tattggtggt | 720 |
| attgccaatg atgaattggc tagaaaagct ggtttgaact gtactaatgg tgttaccgtt | 780 |
| tctgctcatg gtatgactga tgttgatggt gtttttgctt gtggtgattg tgcttaccat | 840 |
| ttcaacagat tctctaagac ttggaccaga ttggaatctg ttcaaaacgc tcaagatcaa | 900 |
| gctaaagctg ctggtttggc tattgctggt aaacattctc cagatatctc tgttccaaga | 960 |
| ttctggtctg atcaattcga cttgaagttg caaactactg gtattgctgg ttcttttgat | 1020 |
| gctgctgttg ttagaggtac tgttgatact ggtagattct ctaccttcta cttcaaggat | 1080 |
| ggttgtttgt tggctgttga ctctattaac agaccaggtg atcaattggt tgccagaaga | 1140 |
| ttgattgcag ctggtgtttc tccatctcaa ggtgaagctg ctgatatttc tttcgacttg | 1200 |
| aaatctttgg tcactccata a | 1221 |

SEQ ID NO: 52

| | |
|---|---|
| MKGLVVVGAS YAGVQAALTA RDAGFAKPIA IVGDEPCLPY QRPPLSKDYL LDNASEQSLF | 60 |
| LRDNAFFGAK GIELILGSRV IDIDLRDRRA ILERGSVLGF EQLVIAAGSR ARRLEVPGGH | 120 |
| LEGVCYLRSL SDAAHLKMRL KQAEDVVIIG GGFIGLEVAA SATKLGKKVV LIEAGHRLLE | 180 |
| RATSPVVSSF LLDAHLRAGV EIRLLETVAA FEGARGKLST VLLSSGSKVR ADMVVVGIGG | 240 |
| IANDELARKA GLNCTNGVTV SAHGMTDVDG VFACGDCAYH FNRFSKTWTR LESVQNAQDQ | 300 |
| AKAAGLAIAG KHSPDISVPR FWSDQFDLKL QTTGIAGSFD AAVVRGTVDT GRFSTFYFKD | 360 |
| GCLLAVDSIN RPGDQLVARR LIAAGVSPSQ GEAADISFDL KSLVTP | 406 |

SEQ ID NO: 53

| | |
|---|---|
| atgagagtcg aaaaccacaa cagagatgtt atcggtgttt ctgttgctcc aactcacttg | 60 |
| gataatttgt catctgctat cttgcaacaa ggtggtatgg ctagagtttc tttgccaggt | 120 |
| gatgttgtta cttgggctgc tggtggtcat caaactttga gaagaatttt gtccgaccag | 180 |
| agattcaaca gagattggag acagtggaga gctttacaag atggtgaaat tccagaagat | 240 |
| catccattga ttggtatgtg caaggttgat aacatggtta ctgctcatgg tgctgatcat | 300 |
| agaagattga gaggtttgtt gtctagatct ttcccaccat ctagaattgc tttgttggct | 360 |
| ccaagaattg aacaatgggt tgatagatta ttggccgaaa tggctcaaag aggtggttct | 420 |
| gctgatttga tgtgtgaatt tgctgttcca ttgcctacca atgttattgc tgaattattc | 480 |
| ggtttgccag acgaacagag agaagaaata gttgctttga cttactcttt ggctaacact | 540 |
| tctgctactg ctgctgaagt tagacaaacc agacaaagaa ttccagagtt cttcagaaga | 600 |
| ttgatcgctt tgaaaagggg tcaattgggt gatgatttgg cttctgcttt gatagttgct | 660 |
| agagataacg gtgaattggt ttccgatacc gaattgatcg atatgttgtt catggttttg | 720 |
| tccgctggtt tcgttactac tactggtgtt attggtaatg gtgttttggc tttgttgacc | 780 |
| catccacaac aattgcattt ggttagagct ggtcaagttc catggtcaca agctattgaa | 840 |
| gaaattttga gatggggttc ctctgttgct aatttgcctt ttagatacgc taccgaagat | 900 |
| gttgaaattg atggttgcat ggttagaaga ggtgatgctg ttttgatggc ttttcatgct | 960 |
| gctaatagag atgagaaagc ttttggtcca ggtgctgata gatttgatgt tactagaagg | 1020 |
| cataacccac acttgtcttt tggtgaaggt ccacattttt gtttgggtgc tgctttggct | 1080 |
| agattggaat tgagatgtgc ttttccagct ttgtttgcca gattggaaga tttggctttg | 1140 |
| actattgctg ctgaagatgt tgtttacatg ccatcctacg ttattagatg cccacaaaga | 1200 |
| ttgccagtta ctttcagacc atctattgcc tga | 1233 |

SEQ ID NO: 54

| | |
|---|---|
| MRVENHNRDV IGVSVAPTHL DNLSSAILQQ GGMARVSLPG DVVTWAAGGH QTLRRILSDQ | 60 |
| RFNRDWRQWR ALQDGEIPED HPLIGMCKVD NMVTAHGADH RRLRGLLSRS FPPSRIALLA | 120 |
| PRIEQWVDRL LAEMAQRGGS ADLMCEFAVP LPTNVIAELF GLPDEQREEI VALTYSLANT | 180 |
| SATAAEVRQT RQRIPEFFRR LIALKRGQLG DDLASALIVA RDNGELVSDT ELIDMLFMVL | 240 |
| SAGFVTTTGV IGNGVLALLT HPQQLHLVRA GQVPWSQAIE EILRWGSSVA NLPFRYATED | 300 |
| VEIDGCMVRR GDAVLMAFHA ANRDEKAFGP GADRFDVTRR HNPHLSFGEG PHFCLGAALA | 360 |
| RLELRCAFPA LFARLEDLAL TIAAEDVVYM PSYVIRCPQR LPVTFRPSIA | 410 |

SEQ ID NO: 55

| | |
|---|---|
| atgggtttgg cttcttcttg ggtcttgtac actgctattt ttgctggtgc tttggctttg | 60 |
| agatgggttt tgttgagagt taacaagtgg gtttacgagg gtagattgaa gggtaaatct | 120 |
| tatcatttgc caccaggtga tttgggttgg ccattgattg gtaatatgtg gacttttttg | 180 |
| agagccttca agaccaagaa tccagactct ttcatttcca acatcgtcga aagatatggt | 240 |
| aagggtggta tctacaagac tttcatgttt ggtaacccat ccatcttggt tacttctcca | 300 |
| gaaggttgta gaaaggtttt gaccgatgat gataatttca aaccaggttg gccaacttct | 360 |
| accgaagaat tgataggtaa gaagtccttc gtcagcatct cttacgaaga acataagaga | 420 |
| ttgagaagat tgacctctgc tccagttaat ggtcatgaag ctttgtcctt gtacatccct | 480 |
| tacatcgaaa agaacgttat ctccgatttg gagaagtggt ctaagatggg taacattgaa | 540 |
| ttcttgaccg gtgttagaaa gttgaccttc aagatcatca tgtacatttt cttgtccgcc | 600 |
| gaatctggtg atgttatgga agctttggaa aaagagtaca ccatcttgaa ctatggtgtt | 660 |
| agagctttgg ccattaacat tccaggtttt gcttttcata aggccttcaa ggctagaaag | 720 |
| aatttggttg ctactttaca agctaccgtt gacgaaagaa ggcaaagaga aagagaaaac | 780 |
| tcttccgcta gagaaaagga tatgttggat gctttgttgc acgttgaaga tgagaatggt | 840 |
| agaaaattga ccgacgaaga aatcatcgac ttgttgatca tgtacttgaa cgctggtcat | 900 |
| gaatcttcag gtcatgttac tatgtgggct actttgttgt tgcaaggtca tccagaaatt | 960 |
| ttccaaagag ctaaggctga acaagaagag atcgttaaga atagaccacc aactcaaaag | 1020 |
| ggtttgacct tgagagaagt taggaagatg gaatacttgt cccaagttat tgacgaaacc | 1080 |
| ttgagatggt tgaccttctc attgatggtt ttcagagaag ctaaggccga tgttaatatt | 1140 |
| ggtggttact tgtttccaaa gggttggaaa gttttggttt ggttcagagc tgttcattac | 1200 |
| gatccagaaa tctacccaaa tccagaagtt ttcaatccat ccagatggga taatttcact | 1260 |
| ccaaaggctg gtactttttt gccatttggt gctggttcta gattgtgtcc aggtaatgat | 1320 |
| ttggccaagt tggaaatctc tatcttcttg cactacttct tgttgaacta cagattggaa | 1380 |
| agggttaacc caggttgtga attgatgtat ttgccacatc caagaccagt tgataactgt | 1440 |
| ttggctagag ttagaaaggt tgcctga | 1467 |

SEQ ID NO: 56

| | |
|---|---|
| MGLASSWVLY TAIFAGALAL RWVLLRVNKW VYEGRLKGKS YHLPPGDLGW PLIGNMWTFL | 60 |
| RAFKTKNPDS FISNIVERYG KGGIYKTFMF GNPSILVTSP EGCRKVLTDD DNFKPGWPTS | 120 |
| TEELIGKKSF VSISYEEHKR LRRLTSAPVN GHEALSLYIP YIEKNVISDL EKWSKMGNIE | 180 |
| FLTGVRKLTF KIIMYIFLSA ESGDVMEALE KEYTILNYGV RALAINIPGF AFHKAFKARK | 240 |
| NLVATLQATV DERRQREREN SSAREKDMLD ALLHVEDENG RKLTDEEIID LLIMYLNAGH | 300 |
| ESSGHVTMWA TLLLQGHPEI FQRAKAEQEE IVKNRPPTQK GLTLREVRKM EYLSQVIDET | 360 |
| LRWLTFSLMV FREAKADVNI GGYLFPKGWK VLVWFRAVHY DPEIYPNPEV FNPSRWDNFT | 420 |
| PKAGTFLPFG AGSRLCPGND LAKLEISIFL HYFLLNYRLE RVNPGCELMY LPHPRPVDNC | 480 |
| LARVRKVA | 488 |

SEQ ID NO: 57

| | |
|---|---|
| atgatcttgg agatgggttc tatgtgggtt gttttgatgg ctattggtgg tgctttgttg | 60 |
| gttttgagat ccatcttgaa gaatgtcaac tggtggttgt acgaatctaa gttgggtgtt | 120 |
| aagcaatact ctttgccacc aggtgatatg ggttggcctt ttattggtaa tatgtggtct | 180 |
| ttcttgaggg ccttcaaatc taaagatcca gactccttca tctcctccat cgtttctaga | 240 |
| tatggttctt ctggtatcta caaggctttg atgtttggta acccatctgt tatcgttact | 300 |
| actccagaag gttgtaagag ggttttgact gatgacgaaa agtttactac tggttggcca | 360 |
| caatctacca ttgaattgat tggtaagaac tccttcattg ccatgactta cgaagaacac | 420 |
| aagagattga gaaggttgac ctcctcttct attaacggta tggaagcttt gtccttgtac | 480 |
| ttgaagtaca tcgaagagaa cgtgatcatc tctttggaaa agtggtctaa catgggtcag | 540 |
| attgaattct tgaccgagat taggaagttg accttcaaga tcatcatgca cattttcttg | 600 |
| tcctccgaat ctgaaccagt tatggaagcc ttggaaaaag agtacaccat tttgaaccat | 660 |
| ggtgttagag ctatgcaaat caatgttcca ggtttcgctt actacaaagc tttgaaggct | 720 |
| agaaagaact tggtcggtat tttccaatcc atcgttgatg acagaagaaa catcagaaag | 780 |
| gtctactccc aaaaaaaggc caaggatatg atggattcct tgatcgatgt tgaagatgac | 840 |
| aacggtagaa agttgaacga cgaagatatc atcgacatca tgttgatgta cttgaacgct | 900 |
| ggtcatgaat cctctggtca tattactatg tgggctactt acttcttgca aaagcaccca | 960 |
| gaatacttga agaaggccaa agaagaacaa gaagaaatca tcaagagaag gccatctact | 1020 |
| caaaagggtt tgaccttgaa agaaatcaga ggtatggact tcttgtacaa ggttattgac | 1080 |
| gaaaccatga gggtgattac cttctcattg gttgttttca gagaagccaa gtctgatgtt | 1140 |
| accattaacg gttacactat tccaaagggt tggaaggttt tgacctggtt tagatctgtt | 1200 |
| catttggacc cagaaatcta cccaaaccca aaagaattca acccaaacag gtggaacaaa | 1260 |
| gaacataagg ctggtgaatt tttgccattt ggtgctggta ctagattgtg tccaggtaat | 1320 |
| gatttggcca agatggaaat tgctgttttc ttgcatcatt tcaccttgaa ctacaggttg | 1380 |
| gaacaattga atccaaagtg cccaattaga tacttgccac atacaagacc aatggataac | 1440 |
| tgtttgggta gagttaagaa gtgttaa | 1467 |

SEQ ID NO: 58

| | |
|---|---|
| MILEMGSMWV VLMAIGGALL VLRSILKNVN WWLYESKLGV KQYSLPPGDM GWPFIGNMWS | 60 |
| FLRAFKSKDP DSFISSIVSR YGSSGIYKAL MFGNPSVIVT TPEGCKRVLT DDEKFTTGWP | 120 |
| QSTIELIGKN SFIAMTYEEH KRLRRLTSSS INGMEALSLY LKYIEENVII SLEKWSNMGQ | 180 |
| IEFLTEIRKL TFKIIMHIFL SSESEPVMEA LEKEYTILNH GVRAMQINVP GFAYYKALKA | 240 |
| RKNLVGIFQS IVDDRRNIRK VYSQKKAKDM MDSLIDVEDD NGRKLNDEDI IDIMLMYLNA | 300 |
| GHESSGHITM WATYFLQKHP EYLKKAKEEQ EEIIKRRPST QKGLTLKEIR GMDFLYKVID | 360 |
| ETMRVITFSL VVFREAKSDV TINGYTIPKG WKVLTWFRSV HLDPEIYPNP KEFNPNRWNK | 420 |
| EHKAGEFLPF GAGTRLCPGN DLAKMEIAVF LHHFTLNYRL EQLNPKCPIR YLPHTRPMDN | 480 |
| CLGRVKKC | 488 |

SEQ ID NO: 59

| | |
|---|---|
| atgactgaaa ccggtttgat cttgatgtgg ttcccattga ttatcttggg tttgttcgtt | 60 |
| ttgaagtggg ttttgaagag agttaacgtc tggatctacg tttctaagtt gggtgaaaaa | 120 |
| aagcactatt tgccaccagg tgatttgggt tggccagtta ttggtaatat gtggtctttt | 180 |
| ttgagagcct tcaagacctc tgatccagaa tctttcattc agtcctacat taccagatac | 240 |
| ggtagaactg gtatctacaa ggctcatatg tttggttacc catgtgtttt ggttactact | 300 |
| ccagaaacct gtagaagagt tttgactgat gatgatgcct tccatattgg ttggccaaaa | 360 |
| tctaccatga agttgatcgg tagaaagtcc ttcgttggta tctctttcga agaacacaag | 420 |
| agattgagaa gattgacttc tgctccagtt aatggtccag aagctttgtc tgtttacatc | 480 |
| cagttcattg aagaaaccgt taacaccgat ttggagaagt ggtctaaaat gggtgaaatc | 540 |
| gaattcttgt cccacttgag aaagttgacc ttcaaggtta ttatgtacat cttcttgtcc | 600 |
| tccgaatccg aacatgttat ggattctttg gaaagagagt acaccaactt gaactatggt | 660 |
| gttagagcta tgggtattaa cttgccaggt tttgcttatc atagagcttt gaaggctaga | 720 |
| aagaaattgg ttgctgcttt ccaatctatc gtcaccaaca gaagaaatca gagaaagcag | 780 |
| aacatctcct ccaacagaaa agatatgttg gacaacttga tcgacgtcaa ggacgaaaat | 840 |
| ggtagagttt tggatgacga agaaatcatc gacttgttgt tgatgtactt gaacgctggt | 900 |
| catgaatctt caggtcattt gactatgtgg gctaccattt tgatgcaaga acatccaatg | 960 |
| atcttgcaga aggccaaaga agaacaagaa agaatcgtta agaaaagagc cccaggtcaa | 1020 |
| aagttgactt tgaaagaaac tagggaaatg gtctacttgt cccaagttat tgacgaaacc | 1080 |
| ttgagagtga ttaccttctc attgactgct ttcagagaag ccaaatccga tgttcaaatg | 1140 |
| gatggttaca ttatcccaaa gggttggaaa gttttgacgt ggtttagaaa cgttcacttg | 1200 |
| gatccagaaa tctacccaga tccaaaaaag ttcgatccat caagatggga aggttacact | 1260 |
| ccaaaagctg gtactttttt gccatttggt ttgggttctc atttgtgtcc aggtaatgat | 1320 |
| ttggccaagt tggaaatctc catcttcttg catcatttct tgttgaagta cagggtcgaa | 1380 |
| agatctaatc caggttgtcc agttatgttc ttgccacata atagaccaaa ggataactgc | 1440 |
| ttggctagaa ttactagaac catgccatga | 1470 |

SEQ ID NO: 60

| | |
|---|---|
| MTETGLILMW FPLIILGLFV LKWVLKRVNV WIYVSKLGEK KHYLPPGDLG WPVIGNMWSF | 60 |
| LRAFKTSDPE SFIQSYITRY GRTGIYKAHM FGYPCVLVTT PETCRRVLTD DDAFHIGWPK | 120 |
| STMKLIGRKS FVGISFEEHK RLRRLTSAPV NGPEALSVYI QFIEETVNTD LEKWSKMGEI | 180 |
| EFLSHLRKLT FKVIMYIFLS SESEHVMDSL EREYTNLNYG VRAMGINLPG FAYHRALKAR | 240 |
| KKLVAAFQSI VTNRRNQRKQ NISSNRKDML DNLIDVKDEN GRVLDDEEII DLLLMYLNAG | 300 |
| HESSGHLTMW ATILMQEHPM ILQKAKEEQE RIVKKRAPGQ KLTLKETREM VYLSQVIDET | 360 |
| LRVITFSLTA FREAKSDVQM DGYIIPKGWK VLTWFRNVHL DPEIYPDPKK FDPSRWEGYT | 420 |
| PKAGTFLPFG LGSHLCPGND LAKLEISIFL HHFLLKYRVE RSNPGCPVMF LPHNRPKDNC | 480 |
| LARITRTMP | 489 |

SEQ ID NO: 61

| | |
|---|---|
| atggctgaaa ctacttcttg gattccagtt tggtttccat tgatggtttt gggttgtttt | 60 |
| ggtttgaact ggttggttag aaaggttaac gtttggttgt acgaatcttc cttgggtgaa | 120 |
| aacagacatt atttgccacc aggtgatttg ggttggcctt ttattggtaa tatgttgtcc | 180 |
| ttcttgagag ccttcaaaac ctctgatcca gattctttca ctaggacctt gattaagaga | 240 |
| tacggtccaa aaggtatcta caaggctcat atgtttggta acccatctat tatcgttacc | 300 |
| acctctgata cctgtagaag agttttgact gatgatgatg cttttaaacc aggttggcca | 360 |
| acttctacca tggaattgat tggtagaaag tccttcgttg gtatctcttt cgaagaacac | 420 |
| aagagattga gaagattgac tgctgctcca gttaatggtc atgaagcttt gtctacctac | 480 |
| atcccttaca tcgaagaaaa cgttattacc gttttggaca agtggactaa gatgggtgaa | 540 |
| tttgaattct tgacccactt gagaaagttg accttcagaa tcatcatgta cattttcttg | 600 |
| tcctccgaat ccgaaaacgt tatggatgct ttggaaagag agtacactgc tttgaattat | 660 |
| ggtgttagag ctatggccgt taacattcca ggttttgctt atcatagagc tttgaaggct | 720 |
| agaaagactt tggttgctgc tttccaatct atcgttaccg aaagaagaaa tcagaggaag | 780 |
| cagaacatct tgtccaacaa aaaggatatg ttggacaact tgttgaacgt taaggacgaa | 840 |
| gatggtaaga ccttggatga tgaagaaatc atcgatgtct tgttgatgta cttgaacgct | 900 |
| ggtcatgaat cttccggtca tacaattatg tgggctactg ttttcttaca agaacaccca | 960 |
| gaagttctac aaagagctaa agctgaacaa gaaatgatct tgaagtctag accagaaggt | 1020 |
| caaaagggct tgtctttgaa agaaaccaga aagatggaat tcttgtccca agttgttgac | 1080 |
| gaaaccttga gagttattac cttctcattg accgctttca gagaagctaa aaccgatgtt | 1140 |
| gaaatgaacg gttacttgat tccaaagggt tggaaagttt tgacgtggtt cagagatgtt | 1200 |
| catatcgatc cagaagtttt cccagatcca agaaaatttg atccagctag atgggataat | 1260 |
| ggtttcgttc caaaagctgg tgcttttttg ccatttggtg ctggttctca tttgtgtcca | 1320 |
| ggtaatgatt tggccaagtt ggaaatctcc atcttcttgc atcacttttt gttgaagtac | 1380 |
| caggtcaaga gatctaaccc agaatgtcca gttatgtact tgccacatac aagaccaact | 1440 |
| gataactgct tggctagaat ctcttaccag tga | 1473 |

SEQ ID NO: 62

| | |
|---|---|
| MAETTSWIPV WFPLMVLGCF GLNWLVRKVN VWLYESSLGE NRHYLPPGDL GWPFIGNMLS | 60 |
| FLRAFKTSDP DSFTRTLIKR YGPKGIYKAH MFGNPSIIVT TSDTCRRVLT DDDAFKPGWP | 120 |
| TSTMELIGRK SFVGISFEEH KRLRRLTAAP VNGHEALSTY IPYIEENVIT VLDKWTKMGE | 180 |
| FEFLTHLRKL TFRIIMYIFL SSESENVMDA LEREYTALNY GVRAMAVNIP GFAYHRALKA | 240 |
| RKTLVAAFQS IVTERRNQRK QNILSNKKDM LDNLLNVKDE DGKTLDDEEI IDVLLMYLNA | 300 |
| GHESSGHTIM WATVFLQEHP EVLQRAKAEQ EMILKSRPEG QKGLSLKETR KMEFLSQVVD | 360 |
| ETLRVITFSL TAFREAKTDV EMNGYLIPKG WKVLTWFRDV HIDPEVFPDP RKFDPARWDN | 420 |
| GFVPKAGAFL PFGAGSHLCP GNDLAKLEIS IFLHHFLLKY QVKRSNPECP VMYLPHTRPT | 480 |
| DNCLARISYQ | 490 |

SEQ ID NO: 63

| | |
|---|---|
| atggcttcct tgtggtttat tttcggtgct attgctggtg ctttgttggt tttgagatct | 60 |
| ttgttgaaga acgtcaactg gttcttgtac gaagctaaat tgggtgacaa gcaatattct | 120 |
| ttgccaccag gtgatatggg ttggccaatt attggtaata tgtggtcttt cttgagggcc | 180 |
| ttcaaatctt ctaagccaga ttctttcatg gactccatcg ttaagagatt tggtaacact | 240 |
| ggtatctaca aggtgttcat gtttggtttc ccatctgtta tcgttacttc tccagaagct | 300 |
| tgcaaaaagg ttttgactga tgacgaaaat ttcgaaccag gttggccaca atctaccgtt | 360 |
| gaattgattg gtgaaaagtc cttcatcaag atgccattcg aagaacatag aaggttgaga | 420 |
| agattgacct ccgcttctat taacggttat gaagctttgt ccgtctactt gaagtacatc | 480 |
| gaagaaatcg tcatctcctc attggaaaag tggactcaaa tgggtgaaat cgaattcttg | 540 |
| acccagatga gaaagttgac cttcaagatc atcatccaca ttttcttggg ttccgaatct | 600 |
| gaaccagtta tggaagcttt ggaaagagag tacactgttt tgaacttggg tgttagagct | 660 |
| atgagaatca acattccagg tttcgctttc cacaaatctt tgaaggctag aaagaacttg | 720 |
| gttgccatct tccaatctat cgttgacaag agaagaaacg agagaagagg taaagaacca | 780 |
| gctccaggta aaaaagctaa ggatatgatg gattccttga tcgatgctgt tgacgaaaat | 840 |
| ggtagaaaat tgggtgatga cgaaatcatc gacatcatgt tgatgtactt gaacgctggt | 900 |
| catgaatcct ctggtcatat tactatgtgg gctacttact tcttgcaaag acatccagaa | 960 |
| ttcttcagaa aggccaaaga agaacaagtc gagatgttga aaagaaggcc accatctcaa | 1020 |
| aaaggtttga agttggaaga tgtgagaaag atggaatact tgtccaaggt tattgacgaa | 1080 |
| accatgagag ttgttacctt cagcttgatg gttttcagac aagctagaaa cgatgttaag | 1140 |
| gtcaacggtt acttgattcc aaaaggttgg agagttttga cgtggttcag atctgttcat | 1200 |
| ttcgattccg aattataccc agacccaaga gaattcaatc cagaaaactt ctccgttgtt | 1260 |
| agaaaggctg gtgaattttt gccatttggt gctggtacta gattgtgtcc aggtaatgat | 1320 |
| ttggccaagt tggaaatctc tgttttcttg catcacttct tgttgaagta cgaattggaa | 1380 |
| cagttgaacc caaagtcccc aattagattt ttgccacata caagaccatt ggataactgc | 1440 |
| ttggctagaa tcaaaaaaca agaagctgcc taa | 1473 |

SEQ ID NO: 64

| | |
|---|---|
| MASLWFIFGA IAGALLVLRS LLKNVNWFLY EAKLGDKQYS LPPGDMGWPI IGNMWSFLRA | 60 |
| FKSSKPDSFM DSIVKRFGNT GIYKVFMFGF PSVIVTSPEA CKKVLTDDEN FEPGWPQSTV | 120 |
| ELIGEKSFIK MPFEEHRRLR RLTSASINGY EALSVYLKYI EEIVISSLEK WTQMGEIEFL | 180 |
| TQMRKLTFKI IIHIFLGSES EPVMEALERE YTVLNLGVRA MRINIPGFAF HKSLKARKNL | 240 |
| VAIFQSIVDK RRNERRGKEP APGKKAKDMM DSLIDAVDEN GRKLGDDEII DIMLMYLNAG | 300 |
| HESSGHITMW ATYFLQRHPE FFRKAKEEQV EMLKRRPPSQ KGLKLEDVRK MEYLSKVIDE | 360 |
| TMRVVIFSLM VFRQARNDVK VNGYLIPKGW RVLTWFRSVH FDSELYPDPR EFNPENFSVV | 420 |
| RKAGEFLPFG AGTRLCPGND LAKLEISVFL HHFLLKYELE QLNPKSPIRF LPHTRPLDNC | 480 |
| LARIKKQEAA | 490 |

SEQ ID NO: 65

| | |
|---|---|
| atggaatcta cttgggctgt tgctgctgtt gttacagctg ttgttgcagt tgctactgtt | 60 |
| ttctctgttt tgaaatgggc tgctaagtct ttgaacgaat ggatctatga agctaagttg | 120 |
| ggtgatagaa gattggcttt gccaccaggt gatttgggtt ggccattgat tggtaatatg | 180 |
| ttgggttttt tgagggcctt caagtctaag aatccagaaa ctttcatcga cggttacgtt | 240 |
| tctagatacg gtaaaactgg tgtttacaag gttcacttgt ttggtaaccc atctgttgtt | 300 |
| gttactactc cagaaacctg tagaaaggtt ttgactgatg atgaagcttt tcaaccaggt | 360 |
| tggccaagag ctgctgttga attgattggt gaaaagtcct tcatccagat gccacaagaa | 420 |
| gaacataaga gattgagaag attgacctct gctccagtta atggttttga agctttgtcc | 480 |
| aactacatcc cttacatcga aaagaacgtc ttggaatctt tggagaagtg gtctaaaatg | 540 |
| ggtccaattg aattcttgac ccagttgaga aagttgacct tcaccgttat tatgtacatc | 600 |
| ttcttgtcct ccgaatccga accagttatg gaaatgttgg aaaaagagta caccaggttg | 660 |
| aactacggtg ttagagatat gagaatcaac ttgccaggtt tcgcttatca taaggctttg | 720 |
| aaggctagaa agaatttggt tgctgctttg aagggtatcg ttactgaaag aagaaggcaa | 780 |
| aagttggata agtgggctcc aaaaagaaag gatatgatgg accaattgat cgacatcgtt | 840 |
| gacgaaaatg gtagaaagtt ggatgacgaa gaaatcatcg acatcttgat catgtacttg | 900 |
| aacgctggtc atgaatcttc aggtcataca atgatgtggg ctaccatctt gttgaatcaa | 960 |
| catccagaag ttttgaagaa ggccagggaa gaacaagaag ctatcgttag aaatagacca | 1020 |
| gcaggtcaaa ctggcttgac tttgaaagaa tgtagagaca tggaatactt gtccaaggtt | 1080 |
| gttgacgaaa ccttgagata cgtttccttc tcattggtcg ttttcagaga agctcaaatg | 1140 |
| gatgttaact tgaacggtta cttgattcca aagggttgga aagttttggc ctggttcaga | 1200 |
| tctattcact acgattctga agtttaccca gacccaaaaa agttcgaacc atcaagatgg | 1260 |
| gatggttttg ttccaaaagc tggtgaattt ttgccatttg gtgctggttc tagattgtgt | 1320 |
| ccaggtaatg atttggctaa gttggaaatc tgcatcttcg tccactactt tttgttgaac | 1380 |
| tacaacttgg aatggttgac cccagattgt gaaatcttgt atttgccaca ttccagacca | 1440 |
| aaggataact gcatggctaa gattaccaag aaatcttctg ttgctgccta a | 1491 |

SEQ ID NO: 66

| | |
|---|---|
| MESTWAVAAV VTAVVAVATV FSVLKWAAKS LNEWIYEAKL GDRRLALPPG DLGWPLIGNM | 60 |
| LGFLRAFKSK NPETFIDGYV SRYGKTGVYK VHLFGNPSVV VTTPETCRKV LTDDEAFQPG | 120 |
| WPRAAVELIG EKSFIQMPQE EHKRLRRLTS APVNGFEALS NYIPYIEKNV LESLEKWSKM | 180 |
| GPIEFLTQLR KLTFTVIMYI FLSSESEPVM EMLEKEYTRL NYGVRDMRIN LPGFAYHKAL | 240 |
| KARKNLVAAL KGIVTERRRQ KLDKWAPKRK DMMDQLIDIV DENGRKLDDE EIIDILIMYL | 300 |
| NAGHESSGHT MMWATILLNQ HPEVLKKARE EQEAIVRNRP AGQTGLTLKE CRDMEYLSKV | 360 |
| VDETLRYVSF SLVVFREAQM DVNLNGYLIP KGWKVLAWFR SIHYDSEVYP DPKKFEPSRW | 420 |
| DGFVPKAGEF LPFGAGSRLC PGNDLAKLEI CIFVHYFLLN YNLEWLTPDC EILYLPHSRP | 480 |
| KDNCMAKITK KSSVAA | 496 |

SEQ ID NO: 67

| | |
|---|---|
| atgggtgaag gtgcttggtg ggctgttgct gctgttgttg ctgctttggc tgttgttgca | 60 |
| ttggatgctg ctgttagaac tgctcatgct tggtattgga ctgcttcttt gggtgctggt | 120 |
| agaagaggta gattgccacc aggtgatatg ggttggccat tggttggtgg tatgtgggct | 180 |
| tttttgagag cttttaaatc tggtagacca gactccttca ttgattcttt tgctagaaga | 240 |
| tttggtagag ccggcttgta tagagctttt atgttttctt ctccaaccat tatggctact | 300 |
| actccagaag cttgtaagca agttttgatg gatgatgatg ctttcgttac tggttggcca | 360 |
| aaagctactg ttgctttgat tggtccaaag tcctttgtta acatgggtta cgatgaacac | 420 |
| agaaggttga gaaaattgac tgctgctcca atcaatggtt tcgatgcttt gacttcttac | 480 |
| ttgggtttca tcgatgatac tgttgttact actttgaggg gttggtctga aaggggtggt | 540 |
| gatggtcatt ttgaattctt gactgaattg agaaggatga ccttcagaat catcgtccaa | 600 |
| attttcatgg gtggtgctga cgaaagaact gctgctgaat tggaaagaac ttacaccgaa | 660 |
| ttgaactacg gtatgagagc tatggctatt gatttgccag gttttgctta ccataaggct | 720 |
| attagagcta gaagaagatt ggttgctgct ttacaaagag ttttggacga gagaagggct | 780 |
| agaggtggta aaactgctgc tggtgctgct gctccagttg atatgatgga tagattgatt | 840 |
| gccgttgaag atgaaggtgg tagaagattg caagatgacg aaatcatcga tgtcttggtc | 900 |
| atgtatttga acgctggtca tgaatcctct ggtcatatta ctatgtgggc tactgttttc | 960 |
| ttgcaagaga acccagaaat tttggctaaa gctaaagctg aacaagaggc cattatgaga | 1020 |
| tctattccac caggtcaaaa aggcttgact ttgagagatt ttagaaagat ggcctacttg | 1080 |
| tcccaagttg ttgacgaaac tttgagattc gtcaacatct ccttcgtgtc ttttagacaa | 1140 |
| gctaccagag atgttttcgt caacggttac ttgattccaa aaggttggaa agtccaattg | 1200 |
| tggtacagat ccgttcatat ggatccacaa gtttatccag atccaaagaa gttcgatcca | 1260 |
| tcaagatggg aaggtccacc accaagagct ggtacttttt tgccatttgg tttgggtact | 1320 |
| agattgtgtc caggtaatga tttggccaag ttggaaatct cagttttctt gcatcatttc | 1380 |
| ttgttgggct acaagttgac tagaaagaac ccaaactgta gagtcagata tttgccacat | 1440 |
| ccaagaccag ttgataactg cttggctaag attaccagat tgtcatcttc tcacggttaa | 150 |

SEQ ID NO: 68

| | |
|---|---|
| MGEGAWWAVA AVVAALAVVA LDAAVRTAHA WYWTASLGAG RRGRLPPGDM GWPLVGGMWA | 60 |
| FLRAFKSGRP DSFIDSFARR FGRAGLYRAF MFSSPTIMAT TPEACKQVLM DDDAFVTGWP | 120 |
| KATVALIGPK SFVNMGYDEH RRLRKLTAAP INGFDALTSY LGFIDDTVVT TLRGWSERGG | 180 |
| DGHFEFLTEL RRMTFRIIVQ IFMGGADERT AAELERTYTE LNYGMRAMAI DLPGFAYHKA | 240 |
| IRARRRLVAA LQRVLDERRA RGGKTAAGAA APVDMMDRLI AVEDEGGRRL QDDEIIDVLV | 300 |
| MYLNAGHESS GHITMWATVF LQENPEILAK AKAEQEAIMR SIPPGQKGLT LRDFRKMAYL | 360 |
| SQVVDETLRF VNISFVSFRQ ATRDVFVNGY LIPKGWKVQL WYRSVHMDPQ VYPDPKKFDP | 420 |
| SRWEGPPPRA GTFLPFGLGT RLCPGNDLAK LEISVFLHHF LLGYKLTRKN PNCRVRYLPH | 480 |
| PRPVDNCLAK ITRLSSSHG | 499 |

SEQ ID NO: 69

| | |
|---|---|
| atgccacaag ctattccagc tcataagatg atgccaattc caggtgttgg tgtttacgtt | 60 |
| tttactgttt tgtgggctgc tactatctac attgcttcat ctttgttgag atggtccttg | 120 |
| gattccttga aacatttgcc aatcgtcaac aacaaagaat ggtactcttt gtctggtaga | 180 |
| aaggccaagt tgagattttt ggctgaatcc aagtctttgt tggaagaagc tagaaagaga | 240 |
| tacccacaac aaccattcag aatcttgtct aattggggtg ttttgttggt tttgccatct | 300 |
| tgttttgccg acgaaatcag aaacgatcag agattgtctt tttcaaaggc tgccttgcaa | 360 |
| gattcccatg gtcatattcc aggtttggaa actgttaagt tggttgccag agatgaccaa | 420 |
| ttgattcaaa ccgttgctag aaagcacttg accaaacatt tggccaaagt tatccaacca | 480 |
| ttgtccgaag aaactgaatt cgctttggat caaaacttcg gtcataaccc agccatcttg | 540 |
| gatattattg ccagaatctc ttccaggatc tacttgggtg atgaattgtg tagaaatact | 600 |
| gcttggttgg ctactactaa ggtttacact tctgcttttt ttgctgcccc agttaagttg | 660 |
| ggtttgattc cagctccatt gagaagattg gctcattggt tgattccaga atgcaagatc | 720 |
| ttgagagaac aagttcaaga agccagaaga atcatcgaac cattggttag aagaaggcaa | 780 |
| gctttgagag ctaaagcttt ggctgaaggt tgtccaactc cacaattcaa tgatgctttg | 840 |
| ggttgggctg ctgaagaatc tgctaaaaat ggtaaagatt acgatccagc cattacccaa | 900 |
| ttggctttgt ctatgttggc tattcatacc acctacgact tgttccaaca atgcatttta | 960 |
| gatttggccc aaaacccaca tttcatcgaa cctttgagac aagaagccat cgaagtcatt | 1020 |
| caacaatatg gttggacaaa gcaaggcttg taccatatga agttgttgga ttccgctttg | 1080 |
| aaagaaaccc aaagattgaa accaggttcc atggttacta tgagaagata tgtcttggag | 1140 |
| gacttgcaat tgtccaacgg tttgattttg aaaaagggca ccagaatcaa catcgacact | 1200 |
| caaagaatga gagatccaga cttgcatgaa gatccattga agtacgatgc tttcaggttc | 1260 |
| tacaagatga gacaacaacc aggtggtgaa catactgctc aattggtttc tacttctcca | 1320 |
| gatcatttgg gttttggtca tggtgaacat tcttgtccag gtagattttt tgctgctaac | 1380 |
| gaaatcaaag ttgccatggc tcatatgttg atcaagtacg aatggaaacc agctggtcat | 1440 |
| tcttctgctg gtccagatgt taagggtttg ttgatgaagt ctggtgctgg tgctcaaatt | 1500 |
| gatatcagaa gaagagaaac cgttgagatc gcttga | 1536 |

SEQ ID NO: 70

| | |
|---|---|
| MPQAIPAHKM MPIPGVGVYV FTVLWAATIY IASSLLRWSL DSLKHLPIVN NKEWYSLSGR | 60 |
| KAKLRFLAES KSLLEEARKR YPQQPFRILS NWGVLLVLPS CFADEIRNDQ RLSFSKAALQ | 120 |
| DSHGHIPGLE TVKLVARDDQ LIQTVARKHL TKHLAKVIQP LSEETEFALD QNFGHNPAIL | 180 |
| DIIARISSRI YLGDELCRNT AWLATTKVYT SAFFAAPVKL GLIPAPLRRL AHWLIPECKI | 240 |
| LREQVQEARR IIEPLVRRRQ ALRAKALAEG CPTPQFNDAL GWAAEESAKN GKDYDPAITQ | 300 |
| LALSMLAIHT TYDLFQQCIL DLAQNPHFIE PLRQEAIEVI QQYGWTKQGL YHMKLLDSAL | 360 |
| KETQRLKPGS MVTMRRYVLE DLQLSNGLIL KKGTRINIDT QRMRDPDLHE DPLKYDAFRF | 420 |
| YKMRQQPGGE HTAQLVSTSP DHLGFGHGEH SCPGRFFAAN EIKVAMAHML IKYEWKPAGH | 480 |
| SSAAGPDVKL LMKSGAGAQI DIRRRETVEI A | 511 |

SEQ ID NO: 71

| | |
|---|---|
| atggaagtcg gtatggttat gaaggcttct ttgtctttgt gttgtgttgg tgcttgttgt | 60 |
| ttggccttgt acttgtatta tatcgtttgg gttgttccac aaaggttgtt ggctggtttt | 120 |
| agaaggcaag gtattggtgg tccaagacca tcttttccat atggtaattt ggccgatatg | 180 |
| aaggaagctg ttgctgctgc taaagttgct tctagaggtg ttggtggtat cgttcatgat | 240 |
| tatagaccag ctgttttgcc attctacgag aagtggagaa aagaacatgg tccagttttc | 300 |
| acttactcca tgggtaatgt tgttttcttg cacgtttcta gaccagatgt tgttagagat | 360 |
| atcaacttgt gcgtttcctt ggacttgggt aaatcttctt acttgaaggc tactcacgaa | 420 |
| cctttgtttg gtagaggtat tttgaagtct aatggtcaag cttgggctca ccaaagaaag | 480 |
| attattgctc cagcattctt cttggataag gttaagggta tggttgattt gatggttgat | 540 |
| tctgctcaaa ccttgttgaa gtcttgggaa gaaagggttg atggtaatgg tggtactgtt | 600 |
| aacatcaaga tcgatgatga tatcagagct tactccgccg atgttatttc tagaacttgt | 660 |
| ttcggttcct cctacatcaa gggtaagaag atctttttga agttgagaga attgcagaag | 720 |
| gccgtttcta agccaaatgt tttggctgaa atgactggtt tgaggttgtt tccaactaag | 780 |
| aagaatagac aagcctggga attgcataga caagttcata agttgatctt ggaaatcgtc | 840 |
| aaagaatccg gtgaggataa gaacttgttg tctactattt tacactccgc ctcttcatct | 900 |
| aaagttggtt tgggtgaagc tgaaaacttc atcgttgata actgcaagtc tatctacttc | 960 |
| gctggttatg aatctactgc tgttactgct gcttggtgtt tgatgttgtt gggtttacat | 1020 |
| ccagaatggc aagataaggt tagagaagag gttcaagagg tttgtggtgg tagaccaatt | 1080 |
| gattctcaat ccttgcaaaa gatgaagaac ctaaccatgg tcatccaaga aactttgaga | 1140 |
| ttatatccag ctggtgcctt cgtttctaga atggctttac aagaattgaa gttgggtggt | 1200 |
| gttaacatcc caaagggtgt taatatctac atcccagttt ctaccatgca cttggatcca | 1260 |
| aaattgtggg gtgctgatgt caaagaattc aacccagaaa gattctctga tgccagacca | 1320 |
| caattgcatt cttatttgcc atttggtgct ggtgctagaa catgtttggg tcaaggtttt | 1380 |
| gctactgccg aattgaagat tttgatctcc ttgatcattt ccaagttcgc cttgaagttg | 1440 |
| tccccattat atgaacattc tccaaccttg aagttggtcg ttgaaccaga atttggtgtt | 1500 |
| gatttgactt tgaccaaagt tcaaggtgct tgtagatgct ga | 1542 |

SEQ ID NO: 72

| | |
|---|---|
| MEVGMVMKAS LSLCCVGACC LALYLYYIVW VVPQRLLAGF RRQGIGGPRP SFPYGNLADM | 60 |
| KEAVAAAKVA SRGVGGIVHD YRPAVLPFYE KWRKEHGPVF TYSMGNVVFL HVSRPDVVRD | 120 |
| INLCVSLDLG KSSYLKATHE PLFGRGILKS NGQAWAHQRK IIAPAFFLDK VKGMVDLMVD | 180 |
| SAQTLLKSWE ERVDGNGGTV NIKIDDDIRA YSADVISRTC FGSSYIKGKK IFLKLRELQK | 240 |
| AVSKPNVLAE MTGLRLFPTK KNRQAWELHR QVHKLILEIV KESGEDKNLL STILHSASSS | 300 |
| KVGLGEAENF IVDNCKSIYF AGYESTAVTA AWCLMLLGLH PEWQDKVREE VQEVCGGRPI | 360 |
| DSQSLQKMKN LTMVIQETLR LYPAGAFVSR MALQELKLGG VNIPKGVNIY IPVSTMHLDP | 420 |
| KLWGADVKEF NPERFSDARP QLHSYLPFGA GARTCLGQGF ATAELKILIS LIISKFALKL | 480 |
| SPLYEHSPTL KLVVEPEFGV DLTLTKVQGA CRC | 513 |

SEQ ID NO: 73

| | |
|---|---|
| atggctttca ctgctcaatc ctacttcgat attggtgaac acttgagagt ttccgtcatt | 60 |
| ttgttgttga ctaccgttgt tttgttgttg gtgttctctt tgaaggccag aaagaaatct | 120 |
| ttgttgccat tggttaatgg taacagatgg actgatccat tgggtattga agccaagaaa | 180 |
| aagttcatga cctccgccag atctattatt gctgaacaat tggaaaaagc cccaggtaaa | 240 |
| cctttcagag ttgtttctga tgttggtgaa ttggttgttt tgccaccaga atttgctcca | 300 |
| gaaatcagaa accacaagga cttttctttt accatggctg cttacaagtg gttctatgct | 360 |
| catttgccag gtatggaagg ttttagagaa ggtactaccg aatcccaaat catgaagttg | 420 |
| gttgctagac atcaattgac tcaccaattg actgttgtta ctgctccagt tgctgaagaa | 480 |
| tctgctagag ctttgagaga tgttttcggt tgtgatgaag gttggagaga attgggtact | 540 |
| agacaagctt gcttgcaagt tattgctaga gtctcctcta gaatcttctt gggtcaagaa | 600 |
| ttgtgtagaa acccagattg gttgagagtt acttctacct attctgtttt ggctttcaga | 660 |
| gccgttgttg ttttgagatt ttggccagct ccattgagaa atttggttca ttggtttttg | 720 |
| ccagcttgta aggctgctag agatttggtt caagaagcta gagacttggt taaccctttg | 780 |
| ttgcaagaaa gaaacgaaga aagaagggct caagctaaag gtgaatctgt cttgtataga | 840 |
| aacgatgcca ttgactggtt ggaagaatta gctactgata agaacttgaa ctacgatcca | 900 |
| gctgcttctc aattgtcttt gtctactgct gctttacact cttctactga ttttttcgct | 960 |
| cagttgttgt tggatttggc tgaaagacca ggtttggctg aagaattgag acaagaagct | 1020 |
| gctaaggttg ttaatactga aggttggtct aagggttcct tgttcgattt gaaattgatg | 1080 |
| gactccgtca tgaaggaatc ccaaagattg aaacctattt ccttggcctc tatgagaaga | 1140 |
| tacactactg ctgatgttaa gatgtcctcc ggtgatgtta ttccaaaagg ttctttgaca | 1200 |
| gttgtctccg cttatagaca ttgggacgaa aaaacttacg aaaggccaga tgaattcgat | 1260 |
| ggtcatagat tcttgaggat gagatcccaa gaaggtaaag aacatcaagc ccatttggtt | 1320 |
| tctgctaccc aagatcattt tggtttcggt tatggtttac atgcttgtcc aggtagattt | 1380 |
| ttcgctgctg aagaagttaa gatcgttttg gctcaaatgt tgttgcagta cgaaattaga | 1440 |
| ttggttgccg gttctgattc tagaccagtt catgctggtt tgaatatgta tgctaatcca | 1500 |
| gcctccaaga tctccgttag atatagaggt tcttcctttt aa | 1542 |

SEQ ID NO: 74

| | |
|---|---|
| MAFTAQSYFD IGEHLRVSVI LLLTTVVLLL VFSLKARKKS LLPLVNGNRW TDPLGIEAKK | 60 |
| KFMTSARSII AEQLEKAPGK PFRVVSDVGE LVVLPPEFAP EIRNHKDFSF TMAAYKWFYA | 120 |
| HLPGMEGFRE GTTESQIMKL VARHQLTHQL TVVTAPVAEE SARALRDVFG CDEGWRELGT | 180 |
| RQACLQVIAR VSSRIFLGQE LCRNPDWLRV TSTYSVLAFR AVVVLRFWPA PLRNLVHWFL | 240 |
| PACKAARDLV QEARDLVNPL LQERNEERRA QAKGESVLYR NDAIDWLEEL ATDKNLNYDP | 300 |
| AASQLSLSTA ALHSSTDFFA QLLLDLAERP GLAEELRQEA AKVVNTEGWS KGSLFDLKLM | 360 |
| DSVMKESQRL KPISLASMRR YTTADVKMSS GDVIPKGSLT VVSAYRHWDE KTYERPDEFD | 420 |
| GHRFLRMRSQ EGKEHQAHLV SATQDHFGFG YGLHACPGRF FAAEEVKIVL AQMLLQYEIR | 480 |
| LVAGSDSRPV HAGLNMYANP ASKISVRYRG SSF | 513 |

SEQ ID NO: 75

| | |
|---|---|
| atgagagtta tggttgatca agacttgtgt ggtacttctg gtcaatgtgt tttgactttg | 60 |
| ccaggtactt ttagacaaag ggaaccagat ggtgttgctg aagtttgtgt tgctactgtt | 120 |
| ccacatgctt tacatgctgc tgttagattg gctgcttctc aatgtccagt tgctcattct | 180 |
| ggtcatagaa aaagaaggtg gaggtggaga gctagacaag ctccaacttt gagattattg | 240 |
| cagagaaggc catgtggtat gccaagaaaa acttctacca tctaa | 285 |

SEQ ID NO: 76

| | |
|---|---|
| MRVMVDQDLC GTSGQCVLTL PGTFRQREPD GVAEVCVATV PHALHAAVRL AASQCPVAHS | 60 |
| GHRKRRWRWR ARQAPTLRLL QRRPCGMPRK TSTI | 94 |

SEQ ID NO: 77

| | |
|---|---|
| atgatggaca tggaaatgga agttggtatg gttatgaagg tcttgttggg tttgtgttgt | 60 |
| gttggtgctt gttctttggc actatacttg tattacaccg tttgggttgt cccacaaaga | 120 |
| ttattggctg gttttagaag gcaaggtatt ggtggtccaa gaccatcttt tccatatggt | 180 |
| aatatggccg atatgagaga agctgttgct gctgctaaat ctgctagaag atctggtggt | 240 |
| agaatgagaa tcgttcatga ttatagacca gccgttttgc cattttacga gaagtggaga | 300 |
| aaagaacatg gtccagtttt cacttactcc atgggtaatg ttgttttctt gcacgtttct | 360 |
| agaccagatg ttgttagaga tatcaacttg tgcgtttcct tggacttggg taaatcttct | 420 |
| tacttgaagg ctactcacga acctttgttt ggtagaggta ttttgaagtc taatggtgaa | 480 |
| gcttgggctc accaaagaaa gattattgct ccagaattct tcttggacaa ggttaagggt | 540 |
| atggttgatt tgatggttga ttctgctcaa accttgttgg aatcttggga agctagagtt | 600 |
| gataagtctg gtggtactgt tgatatcaag atcgatgatg atatcagagc ttactccgcc | 660 |
| gatgttattt ctagaacttg tttcggttcc tcctacgtta agggtaagaa gatctttttg | 720 |
| aagttgagag aattgcagaa ggccgtttct aagccaaatg ttttggctga aatgaccggt | 780 |
| ttgagattct ttccaactaa gaagaataga caagcctggg gtttacacaa gcaagttcat | 840 |
| agattgatct tggaaatcgt caaagaatcc ggtgaggata agaatttgtt gagagctatt | 900 |
| ttacactccg cctcttcatc taaagttggt ttgggtgaag ctgaaaactt catcgttgat | 960 |
| aactgcaagt ctatctactt cgctggttat gaatctactg ctgttactgc tgcttggtgt | 1020 |
| ttgatgttgt tgggtttaca tccagaatgg caagatagag ttagacaaga ggttttggaa | 1080 |
| gtttgtggtg gtagaccatt ggattctcaa tccttgcaaa agatgaagaa cctaaccatg | 1140 |
| gtcatccaag aaactttgag attatatcca gctggtgcct tcgtttctag aatggcttta | 1200 |
| caagaattga agttgggtgg tgttcatatc ccaaagggtg ttaatatcta catcccagtt | 1260 |
| tctaccatgc acttggatcc aaaattgtgg ggtccagatg ctaaagaatt caatccagct | 1320 |
| agattctctg atgccagacc acaattgcat tcttatttgc catttggtgc tggtgctaga | 1380 |
| acatgtttgg gtcaaggttt tgctactgcc gaattgaaga ttttgatctc cttgatcatt | 1440 |
| tccaagttcg ccttgagatt gtccccatta tatcaacatt ctccagcctt gaagttgatc | 1500 |
| gttgaaccag aatttggtgt tgatatcacc ttgactaagg ttcaaactgc ttctactact | 1560 |
| acctactaa | 1569 |

SEQ ID NO: 78

| | |
|---|---|
| MMDMEMEVGM VMKVLLGLCC VGACSLALYL YYTVWVVPQR LLAGFRRQGI GGPRPSFPYG | 60 |
| NMADMREAVA AAKSARRSGG RMRIVHDYRP AVLPFYEKWR KEHGPVFTYS MGNVVFLHVS | 120 |
| RPDVVRDINL CVSLDLGKSS YLKATHEPLF GRGILKSNGE AWAHQRKIIA PEFFLDKVKG | 180 |
| MVDLMVDSAQ TLLESWEARV DKSGGTVDIK IDDDIRAYSA DVISRTCFGS SYVKGKKIFL | 240 |
| KLRELQKAVS KPNVLAEMTG LRFFPTKKNR QAWGLHKQVH RLILEIVKES GEDKNLLRAI | 300 |
| LHSASSSKVG LGEAENFIVD NCKSIYFAGY ESTAVTAAWC LMLLGLHPEW QDRVRQEVLE | 360 |
| VCGGRPLDSQ SLQKMKNLTM VIQETLRLYP AGAFVSRMAL QELKLGGVHI PKGVNIYIPV | 420 |
| STMHLDPKLW GPDAKEFNPA RFSDARPQLH SYLPFGAGAR TCLGQGFATA ELKILISLII | 480 |
| SKFALRLSPL YQHSPALKLI VEPEFGVDIT LTKVQTASTT TY | 522 |

SEQ ID NO: 79

| | |
|---|---|
| atgtccatct tcaacatgat tacctcttat gctggttctc agttgttgcc attctacatt | 60 |
| gctatcttcg ttttcacttt ggttccatgg gctattagat tctcttggtt ggaattgaga | 120 |
| aagggttctt ttgttccatt ggctaatcca ccagattctt tgtttggtac tggtaagact | 180 |
| agaaggtcct tcgttaagtt gtccagagaa attttggcta aggccagatc tttgtttcca | 240 |
| aacgaaccat tcagattgat taccgattgg ggtgaagttt tgattttgcc accagatttt | 300 |
| gccgacgaaa ttagaaatga tccaagattg tctttctcaa aggctgccat gcaagataat | 360 |
| catgctggta ttccaggttt cgaaactgtt gctttggttg gtagagaaga tcagttgatt | 420 |
| caaaaggttg ccagaaagca attgaccaaa catttgtccg ctgttatcga accattgtct | 480 |
| agagaatcta ctttggccgt ttctttgaac ttcggtgaaa ctactgagtg gagagctatt | 540 |
| agattgaagc cagccatttt ggatattatc gccagaatct cttccaggat ctatttgggt | 600 |
| gatcaattgt gtagaaacga agcctggttg aagattacta agacttacac taccaacttc | 660 |
| tacaccgctt ctaccaattt gagaatgttc ccaagatcca ttagaccatt ggctcattgg | 720 |
| tttttgccag aatgtagaaa gttgagacaa gaaagaaagg atgccattgg tattatcacc | 780 |
| ccattgatcg aaagaagaag agaattgaga agggctgcta ttgctgctgg tcaaccattg | 840 |
| ccagtttttc atgatgctat tgactggtct gaacaagaag ctgaagctgc tggtactggt | 900 |
| gcttctttgt atccagttat tttccagttg accttgtcct tgttggctat tcatacaacc | 960 |
| tacgatttgt tgcaacagac catgattgat ttgggtagac atccagagta cattgaacca | 1020 |
| ttaagacaag aagttgtcca gttgttgaga gaagaaggtt ggaaaaagac taccttgttc | 1080 |
| aagatgaagt tgttggactc cgctatcaaa gaatcccaaa gaatgaagcc aggttctatc | 1140 |
| gttactatga gaagatacgt taccgaagat atcaccttgt catctggttt gactttgaaa | 1200 |
| aagggtacta gattgaacgt cgataacaga agattggacg atccaaagat ctacgataac | 1260 |
| ccagaagttt acaacccata cagattctac gacatgagat ctgaagctgg taaagatcat | 1320 |
| ggtgctcaat tggtttctac tggttctaat catatgggtt tcggtcatgg tcaacattct | 1380 |
| tgtccaggta gattttttgc tgccaacgaa atcaaagttg ccttgtgtca tatcttggtt | 1440 |
| aagtacgatt ggaagttgtg tccagatact gaaactaagc cagataccag aggtatgatt | 1500 |
| gctaaatctt ctccagttac cgacattttg atcaagagaa gagaatccgt tgaattggat | 1560 |
| ttggaagcca tctga | 1575 |

SEQ ID NO: 80

| | |
|---|---|
| MSIFNMITSY AGSQLLPFYI AIFVFTLVPW AIRFSWLELR KGSVVPLANP PDSLFGTGKT | 60 |
| RRSFVKLSRE ILAKARSLFP NEPFRLITDW GEVLILPPDF ADEIRNDPRL SFSKAAMQDN | 120 |
| HAGIPGFETV ALVGREDQLI QKVARKQLTK HLSAVIEPLS RESTLAVSLN FGETTEWRAI | 180 |
| RLKPAILDII ARISSRIYLG DQLCRNEAWL KITKTYTTNF YTASTNLRMF PRSIRPLAHW | 240 |
| FLPECRKLRQ ERKDAIGIIT PLIERRRELR RAAIAAGQPL PVFHDAIDWS EQEAEAAGTG | 300 |
| ASFDPVIFQL TLSLLAIHTT YDLLQQTMID LGRHPEYIEP LRQEVVQLLR EEGWKKTTLF | 360 |
| KMKLLDSAIK ESQRMKPGSI VTMRRYVTED ITLSSGLTLK KGTRLNVDNR RLDDPKIYDN | 420 |
| PEVYNPYRFY DMRSEAGKDH GAQLVSTGSN HMGFGHGQHS CPGRFFAANE IKVALCHILV | 480 |
| KYDWKLCPDT ETKPDTRGMI AKSSPVTDIL IKRRESVELD LEAI | 524 |

SEQ ID NO: 81

| | |
|---|---|
| atgaacaagt ccaactctat gaacaacacc tctttggaaa ggttgttcca acaattggtt | 60 |
| ttgggtttgg atggtatccc attgatggat gttcattggt tgatctacgt tgcttttggt | 120 |
| gcttggttgt gctcttacgt tattcacgtt ttgtcctctt catccactgt taaggttcca | 180 |
| gttgttggtt acagatctgt ttttgaacct acctggttgt tgagattgag atttgtttgg | 240 |
| gaaggtggtt ccattattgg tcaaggttac aacaagttca aggactccat tttccaagtc | 300 |
| agaaagttgg gtactgatat cgttattatc ccaccaaact tcatcgacga agtgagaaaa | 360 |
| ttgtctcaag acaagaccag atctgtcgaa ccattcatta acgattttgc tggtcagtac | 420 |
| actaggggta tggttttttt acaatccgac ttgcaaaaca gagtcatcca acaaagattg | 480 |
| accccaaagt tggtttcttt gaccaaggtt atgaaggaag aattggatta cgccttgacc | 540 |
| aaagaaatcc cagatatgaa ggatgatgaa tgggttgaag ttgacatctc ctccattatg | 600 |
| gttagattga tctccagaat ttccgccaga gtttttttgg gtccagaaca ttgcagaaat | 660 |
| caagaatggt tgactaacac cgctgaatac tctgaatctt tgttcattac cggtttcatc | 720 |
| ttgagagttg tcccacatat cttgaggcct tttattgctc cattattgcc atcttacaga | 780 |
| accttgttga ggaacgtttc ttctggtaga agagttatcg gtgacatcat cagatctcaa | 840 |
| caaggtgatg gtaacgagga tattttgtct tggatgagag atgctgctac tggtgaagaa | 900 |
| aagcaaattg ataacattgc ccagagaatg ttgatcttgt ccttggcttc tattcatacc | 960 |
| actgctatga ctatgactca tgccatgtat gatttgtgtg ctagaccaga gtatatcgaa | 1020 |
| ccattgagag atgaagttaa gggtgttgtt gatgcttctg gttgggataa gactgctttg | 1080 |
| aatagattgc acagattgga ctcattcttg aaagaatccc aaagattcaa cccagtgttc | 1140 |
| ttgttgactt tcaacagaat ctaccaccag tctatgactt tgtctgatgg tactaatttg | 1200 |
| ccatccggta ctagaattgc tgttccatct catgctatgt tgcaagattc tgctcatgtt | 1260 |
| ccaggtccaa ctccaccaac tgaatttgat ggtttcaggt actccaagat caggtctgat | 1320 |
| tctaattacg cccaaaagta cttgttctcc atgaccgatt cttctaatat ggctttcggt | 1380 |
| tacggtaaat atgcttgtcc aggtagattt tacgcctcca acgaaatgaa gttgaccttg | 1440 |
| gctattttgt tgttgcagtt cgaattcaag ttgccagatg gtaaaggtag accaagaaac | 1500 |
| attaccatcg attccgatat gattccagat ccaagagcta gattgtgcgt cagaaaaaga | 1560 |
| tctttgaggg acgaatga | 1578 |

SEQ ID NO: 82

| | |
|---|---|
| MNKSNSMNNT SLERLFQQLV LGLDGIPLMD VHWLIYVAFG AWLCSYVIHV LSSSSTVKVP | 60 |
| VVGYRSVFEP TWLLRLRFVW EGGSIIGQGY NKFKDSIFQV RKLGTDIVII PPNFIDEVRK | 120 |
| LSQDKTRSVE PFINDFAGQY TRGMVFLQSD LQNRVIQQRL TPKLVSLTKV MKEELDYALT | 180 |
| KEIPDMKDDE WVEVDISSIM VRLISRISAR VFLGPEHCRN QEWLTNTAEY SESLFITGFI | 240 |
| LRVVPHILRP FIAPLLPSYR TLLRNVSSGR RVIGDIIRSQ QGDGNEDILS WMRDAATGEE | 300 |
| KQIDNIAQRM LILSLASIHT TAMTMTHAMY DLCARPEYIE PLRDEVKGVV DASGWDKTAL | 360 |
| NRLHRLDSFL KESQRFNPVF LLTFNRIYHQ SMTLSDGTNL PSGTRIAVPS HAMLQDSAHV | 420 |
| PGPTPPTEFD GFRYSKIRSD SNYAQKYLFS MTDSSNMAFG YGKYACPGRF YASNEMKLTL | 480 |
| AILLLQFEFK LPDGKGRPRN ITIDSDMIPD PRARLCVRKR SLRDE | 525 |

SEQ ID NO: 83

| | |
|---|---|
| atggcagaat tagatacact tgatatagta gtattaggtg ttatcttttt gggtactgtg | 60 |
| gcatacttta ctaagggtaa attgtggggt gttaccaagg atccatacgc taacggattc | 120 |
| gctgcaggtg gtgcttccaa gcctggcaga actagaaaca tcgtcgaagc tatggaggaa | 180 |
| tcaggtaaaa actgtgttgt tttctacggc agtcaaacag gtacagcgga ggattacgca | 240 |
| tcaagacttg caaaggaagg aaagtccaga ttcggtttga acactatgat cgccgatcta | 300 |
| gaagattatg acttcgataa cttagacact gttccatctg ataacatcgt tatgtttgta | 360 |
| ttggctactt acggtgaagg cgaaccaaca gataacgccg tggatttcta tgagttcatt | 420 |
| actggcgaag atgcctcttt caatgagggc aacgatcctc cactaggtaa cttgaattac | 480 |
| gttgcgttcg gtctgggcaa caatacctac gaacactaca actcaatggt caggaacgtt | 540 |
| aacaaggctc tagaaaagtt aggagctcat agaattggag aagcaggtga gggtgacgac | 600 |
| ggagctggaa ctatggaaga ggacttttta gcttggaaag atccaatgtg ggaagccttg | 660 |
| gctaaaaaga tgggcttgga ggaaagagaa gctgtatatg aacctatttt cgctatcaat | 720 |
| gagagagatg atttgacccc tgaagcgaat gaggtatact tgggagaacc taataagcta | 780 |
| cacttggaag gtacagcgaa aggtccattc aactcccaca acccatatat cgcaccaatt | 840 |
| gcagaatcat acgaactttt ctcagctaag gatagaaatt gtctgcatat ggaaattgat | 900 |
| atttctggta gtaatctaaa gtatgaaaca ggcgaccata tcgcgatctg gcctaccaac | 960 |
| ccaggtgaag aggtcaacaa atttcttgac attctagatc tgtctggtaa gcaacattcc | 1020 |
| gtcgtaacag tgaaagcctt agaacctaca gccaaagttc cttttccaaa tccaactacc | 1080 |
| tacgatgcta tattgagata ccatctggaa atatgcgctc cagtttctag acagtttgtc | 1140 |
| tcaactttag cagcattcgc ccctaatgat gatatcaaag ctgagatgaa ccgtttggga | 1200 |
| tcagacaaag attacttcca cgaaaagaca ggaccacatt actacaatat cgctagattt | 1260 |
| ttggcctcag tctctaaagg tgaaaaatgg acaaagatac cattttctgc tttcatagaa | 1320 |
| ggccttacaa aactacaacc aagatactat tctatctctt cctctagttt agttcagcct | 1380 |
| aaaaagatta gtattactgc tgttgtcgaa tctcagcaaa ttccaggtag agatgaccca | 1440 |
| ttcagaggtg tagcgactaa ctacttgttc gctttgaagc agaaacaaaa cggtgatcca | 1500 |
| aatccagctc cttttggcca atcatacgag ttgacaggac caaggaataa gtatgatggt | 1560 |
| atacatgttc cagtccatgt aagacattct aactttaagc taccatctga tccaggcaaa | 1620 |
| cctattatca tgatcggtcc aggtaccggt gttgcccctt ttagaggctt cgtccaagag | 1680 |
| agggcaaaac aagccagaga tggtgtagaa gttggtaaaa cactgctgtt ctttggatgt | 1740 |
| agaaagagta cagaagattt catgtatcaa aaagagtggc aagagtacaa ggaagctctt | 1800 |
| ggcgacaaat tcgaaatgat tacagctttt tcaagagaag gatctaaaaa ggtttatgtt | 1860 |
| caacacagac tgaaggaaag atcaaaggaa gtttctgatc ttctatccca aaaagcatac | 1920 |
| ttctacgttt gcggagacgc cgcacatatg gcacgtgaag tgaacactgt gttagcacag | 1980 |
| atcatagcag aaggccgtgg tgtatcagaa gccaagggtg aggaaattgt caaaaacatg | 2040 |
| agatcagcaa atcaatacca agtgtgttct gatttcgtaa ctttacactg taaagagaca | 2100 |
| acatacgcga attcagaatt gcaagaggat gtctggagtt aa | 2142 |

SEQ ID NO: 84

| | |
|---|---|
| MAELDTLDIV VLGVIFLGTV AYFTKGKLWG VTKDPYANGF AAGGASKPGR TRNIVEAMEE | 60 |
| SGKNCVVFYG SQTGTAEDYA SRLAKEGKSR FGLNTMIADL EDYDFDNLDT VPSDNIVMFV | 120 |
| LATYGEGEPT DNAVDFYEFI TGEDASFNEG NDPPLGNLNY VAFGLGNNTY EHYNSMVRNV | 180 |
| NKALEKLGAH RIGEAGEGDD GAGTMEEDFL AWKDPMWEAL AKKMGLEERE AVYEPIFAIN | 240 |
| ERDDLTPEAN EVYLGEPNKL HLEGTAKGPF NSHNPYIAPI AESYELFSAK DRNCLHMEID | 300 |
| ISGSNLKYET GDHIAIWPTN PGEEVNKFLD ILDLSGKQHS VVTVKALEPT AKVPFPNPTT | 360 |
| YDAILRYHLE ICAPVSRQFV STLAAFAPND DIKAEMNRLG SDKDYFHEKT GPHYYNIARF | 420 |
| LASVSKGEKW TKIPFSAFIE GLTKLQPRYY SISSSSLVQP KKISITAVVE SQQIPGRDDP | 480 |
| FRGVATNYLF ALKQKQNGDP NPAPFGQSYE LTGPRNKYDG IHVPVHVRHS NFKLPSDPGK | 540 |
| PIIMIGPGTG VAPFRGFVQE RAKQARDGVE VGKTLLFFGC RKSTEDFMYQ KEWQEYKEAL | 600 |
| GDKFEMITAF SREGSKKVYV QHRLKERSKE VSDLLSQKAY FYVCGDAAHM AREVNTVLAQ | 660 |
| IIAEGRGVSE AKGEEIVKNM RSANQYQVCS DFVTLHCKET TYANSELQED VWS | 713 |

SEQ ID NO: 85

| | |
|---|---|
| atgatggatg ataccacttc tccatactct acctaccatt ccgttaggtc cattagaaat | 60 |
| caatctgctt gggctttggc tccaattgct gttttcattt gttacgttgt cttgagacac | 120 |
| aacagaaagt ctgttccagc tgcttctgct ggttctcatt ctattttgga accattgtgg | 180 |
| ttggccagat tgagattcat tagagactcc agattcatca tcggtcaagg ttactctaag | 240 |
| ttcaaggata ccattttcaa ggttaccaag gttggtgccg atattatagt tgttgctcct | 300 |
| aagtacgtcg aagagatcag aagattgtct agagatactg gtagatccgt tgaaccattc | 360 |
| attcatgatt tcgccggtga attattgggt ggtttgaatt ttttggagtc cgacttgcaa | 420 |
| accagagttg ttcaacaaaa gttgacccca aacttgaaaa ccatcgttcc agttatggaa | 480 |
| gatgagatgc attacgcttt ggtttccgaa ttggattctt gtttggatgg ttctgaacat | 540 |
| tggaccagag ttgatatgat ccacatgttg tctagaatcg tgtccagaat ttccgccaga | 600 |
| attttcttgg gtcctaagta ctgtagaaac gacttgtggt tgaaaactac tgctgagtac | 660 |
| actgagaact tgttcttgac tggtactttg ttgagattcg tcccaagaat gttgcaaaaa | 720 |
| tggattgctc cattgctacc atccttcaga caattgcaag aaaacagaca agctgccaga | 780 |
| aagatcatct ctgaaatttt gactgatcac cagccagaaa aacatgacga aacatctgat | 840 |
| aatggtgatc catacccaga tatcttgacc ttgatgtttc aagctgctag gggtaaagaa | 900 |
| aaggacattg aagatattgc ccaacacacc ttgttgttgt ccttatcttc tattcatacc | 960 |
| accgctttga ctatgactca agccttgtat gatttgtgtg cttacccaca atatttggat | 1020 |
| ccagttaagc acgaaattgc cgataccttg caatctgaag gttcttggtc taaagctatg | 1080 |
| ttggataagt tgcacatgat ggacagtttg ttgagagaat cccaaagatt gtctccagtt | 1140 |
| ttcttgttga ccttcaacag aatcttgcat actccattga ctttgtccaa cggtattcat | 1200 |
| ttgccaaagg gtactagaat tgctgctcca tctgatgcta ttttgaacga tccatctttg | 1260 |
| gttccaggtc cacaaccagc tgatactttt gatcctttca ggtacattaa ccactctact | 1320 |
| ggtgatgcta aaaagaccaa gactaacttc caaactacct ccttgcaaaa catggctttt | 1380 |
| ggttatggta aatacgcttg tccaggtaga ttttacgttg ccaacgaaat caaattggtc | 1440 |
| ttgggtcatt tgttgatgca ctacgaattc aaatttccac caggtatggg tagaccagtt | 1500 |
| aactctactg ttgatactga tatgtaccca gatttgggtg ccagattatt ggtcagaaaa | 1560 |
| agaaagatgg aagaatga | 1578 |

SEQ ID NO: 86

| | |
|---|---|
| MMDDTTSPYS TYHSVRSIRN QSAWALAPIA VFICYVVLRH NRKSVPAASA GSHSILEPLW | 60 |
| LARLRFIRDS RFIIGQGYSK FKDTIFKVTK VGADIIVVAP KYVEEIRRLS RDTGRSVEPF | 120 |
| IHDFAGELLG GLNFLESDLQ TRVVQQKLTP NLKTIVPVME DEMHYALVSE LDSCLDGSEH | 180 |
| WTRVDMIHML SRIVSRISAR IFLGPKYCRN DLWLKTTAEY TENLFLTGTL LRFVPRMLQK | 240 |
| WIAPLLPSFR QLQENRQAAR KIISEILTDH QPEKHDETSD NGDPYPDILT LMFQAARGKE | 300 |
| KDIEDIAQHT LLLSLSSIHT TALTMTQALY DLCAYPQYLD PVKHEIADTL QSEGSWSKAM | 360 |
| LDKLHMMDSL LRESQRLSPV FLLTFNRILH TPLTLSNGIH LPKGTRIAAP SDAILNDPSL | 420 |
| VPGPQPADTF DPFRYINHST GDAKKTKTNF QTTSLQNMAF GYGKYACPGR FYVANEIKLV | 480 |
| LGHLLMHYEF KFPPGMGRPV NSTVDTDMYP DLGARLLVRK RKMEE | 525 |

SEQ ID NO: 87

| | |
|---|---|
| atgaccaacc actcttcatc ctactactac gaattctaca aggatcactc ccacaccttt | 60 |
| agaagatcta tgtctgagaa taccttgatc tcttcttgtt tggctttggc tacttgcgct | 120 |
| attttgttgt ctattcaatg gttgaagcca caaccattga tcatggttaa tggtagaaag | 180 |
| ttcggtgagt tgtccaatgt tagagctaag agggatttta cttttggtgc tagacagttg | 240 |
| ttggagaagg gttttaagat gtctccagat aagccattca gaatcatggg tgatgttggt | 300 |
| gaattgcata ttttgccacc aaagtacgct tacgaagtca gaaacaacga aaagttgtct | 360 |
| ttcactatgg ctgctttcaa gtggttttat gctcatttgc caggtttcga aggtttcaga | 420 |
| gaaggtacta atgaatccca catcatgaag ttggttgcca gacatcaatt gactcatcaa | 480 |
| ttgacattgg ttaccggtgc tgtttctgaa gaatgtgctt tggttttgaa ggatgtttac | 540 |
| accgattctc cagaatggca tgatattact gctaaggatg ctaacatgaa gttcatggct | 600 |
| agaatcacct tcagagtgtt cttgggtaaa gaaatgtgta gaaacccaca gtggttgaga | 660 |
| attacttcta cctatgctgt tattgccttc agagctgttg aagaattgag attgtggcca | 720 |
| tcttggttaa gaccagttgt tcaatggttt atgccacatt gcactcaatc tagagctttg | 780 |
| gttcaagaag ctagagattt gatcaaccct ttgttggaaa gaagaagaga agaaaaggct | 840 |
| gaagctgaaa gaactggtga aaaggttact tacaacgatg ctgttgaatg gttggatgat | 900 |
| ttggctagag aaaaaggtgt tggttatgat ccagcttgtg ctcaattgtc tttgtctgtt | 960 |
| gctgctttac attctaccac tgatttcttc acccaagtca tgttcgatat tgctcaaaac | 1020 |
| ccagaattga tcgaaccatt gagagaagaa atcatctccg ttttgggtaa acaaggttgg | 1080 |
| tctaagaact ccttgtacaa cttgaagttg atggactccg tcttgaaaga atcccaaaga | 1140 |
| ttgaagccaa ttgccattgc ttctatgaga agattcacta cccataacgt tgaattgtcc | 1200 |
| gatggtgtta ttttgccaaa gaacaagttg accttggttt ccgctcatca acattgggat | 1260 |
| ccagaatatt acaaggaccc attgaagttc gatggttaca gattcttcaa catgagaagg | 1320 |
| gaaccaggta aagaatctaa ggctcaattg gtttctgcta ccccagatca tatgggtttt | 1380 |
| ggttatggtt tacatgcttg tccaggtaga tttttcgctt ccgaagaaat caagattgcc | 1440 |
| ttgtcccata tcttgttgaa gtacgatttt aagccagtcg agggttcttc tatggaacct | 1500 |
| agaaagtatg gtttgaacat gaacgctaat ccaaccgcta aattgtccgt cagaagaaga | 1560 |
| aaagaagaga tcgccatttg a | 1581 |

SEQ ID NO: 88

| | |
|---|---|
| MTNHSSSYYY EFYKDHSHTF RRSMSENTLI SSCLALATCA ILLSIQWLKP QPLIMVNGRK | 60 |
| FGELSNVRAK RDFTFGARQL LEKGFKMSPD KPFRIMGDVG ELHILPPKYA YEVRNNEKLS | 120 |
| FTMAAFKWFY AHLPGFEGFR EGTNESHIMK LVARHQLTHQ LTLVTGAVSE ECALVLKDVY | 180 |
| TDSPEWHDIT AKDANMKFMA RITFRVFLGK EMCRNPQWLR ITSTYAVIAF RAVEELRLWP | 240 |
| SWLRPVVQWF MPHCTQSRAL VQEARDLINP LLERRREEKA EAERTGEKVT YNDAVEWLDD | 300 |
| LAREKGVGYD PACAQLSLSV AALHSTTDFF TQVMFDIAQN PELIEPLREE IISVLGKQGW | 360 |
| SKNSLYNLKL MDSVLKESQR LKPIAIASMR RFTTHNVELS DGVILPKNKL TLVSAHQHWD | 420 |
| PEYYKDPLKF DGYRFFNMRR EPGKESKAQL VSATPDHMGF GYGLHACPGR FFASEEIKIA | 480 |
| LSHILLKYDF KPVEGSSMEP RKYGLNMNAN PTAKLSVRRR KEEIAI | 526 |

SEQ ID NO: 89

| | |
|---|---|
| atggccaacc attcttcatc ctactaccat gaattctaca aggatcattc ccataccgtt | 60 |
| ttgaccttga tgtctgaaaa gccagttatc ttgccatcct tgattttggg tacttgtgct | 120 |
| gttttgttgt gcatccaatg gttgaaacca caaccattga ttatggtcaa cggtagaaag | 180 |
| ttcggtgaat tgtctaatgt tagagccaag agggatttta cttttggtgc cagacaattg | 240 |
| ctagagaagg gtttgaaaat gtctccagat aagccattca gaatcatggg tgatgttggt | 300 |
| gaattgcata ttttgccacc aaagtacgct tacgaagtca gaaacaacga aaagttgtct | 360 |
| ttcactatgg ctgctttcaa gtggttttat gctcatttgc caggtttcga aggtttcaga | 420 |
| gaaggtacta atgaatccca catcatgaag ttggttgcca gacatcaatt gactcatcaa | 480 |
| ttgacattgg ttaccggtgc tgtttctgaa gaatgtgctt tggttttgaa ggatgtttac | 540 |
| accgattctc cagaatggca tgatattact gctaaggatg ctaacatgaa gttgatggct | 600 |
| agaatcacct ctagagtgtt cttgggtaaa gaaatgtgta gaaacccaca gtggttgaga | 660 |
| attacttcta cctatgctgt tattgccttc agagctgttg aagaattgag attgtggcca | 720 |
| tcttggttaa gaccagttgt tcaatggttt atgccacatt gcactcaatc tagagctttg | 780 |
| gttcaagaag ctagagattt gatcaaccct ttgttggaaa gaagaagaga agaaaaggct | 840 |
| gaagctgaaa gaactggtga aaaggttact tacaacgatg ctgttgaatg gttggatgat | 900 |
| ttggctagag aaaaaggtgt tggttatgat ccagcttgtg ctcaattgtc tttgtctgtt | 960 |
| gctgctttac attctaccac tgatttcttc acccaagtca tgttcgatat tgctcaaaac | 1020 |
| ccagaattga tcgaaccatt gagggaagaa attattgccg ttttgggtaa acaaggctgg | 1080 |
| tctaagaatt ccttgtacaa cttgaagttg atcgactccg tcttgaaaga atcccaaaga | 1140 |
| ttgaagccaa ttgccattgc ttctatgaga agattcacta cccataacgt taagttgtcc | 1200 |
| gatggtgtta ttttgccaaa gaacaagttg accttggttt ccgctcatca acattgggat | 1260 |
| ccagaatatt acaaggaccc attgaagttc gatggttaca gattcttcaa catgagaagg | 1320 |
| gaaccaggta aagaatctaa ggctcaattg gtttctgcta ccccagatca tatgggtttt | 1380 |
| ggttatggtt tacatgcttg tccaggtaga tttttcgctt ccgaagaaat caagattgcc | 1440 |
| ttgtcccata tcttgttgaa gtacgatttt aagccagtcg agggttcttc tatggaacct | 1500 |
| agaaagtatg gtttgaacat gaacgctaat ccaaccgcta aattgtccgt cagaagaaga | 1560 |
| aaagaagaga tcgccatttg a | 1581 |

SEQ ID NO: 90

| | |
|---|---|
| MANHSSSYYH EFYKDHSHTV LTLMSEKPVI LPSLILGTCA VLLCIQWLKP QPLIMVNGRK | 60 |
| FGELSNVRAK RDFTFGARQL LEKGLKMSPD KPFRIMGDVG ELHILPPKYA YEVRNNEKLS | 120 |
| FTMAAFKWFY AHLPGFEGFR EGTNESHIMK LVARHQLTHQ LTLVTGAVSE ECALVLKDVY | 180 |
| TDSPEWHDIT AKDANMKLMA RITSRVFLGK EMCRNPQWLR ITSTYAVIAF RAVEELRLWP | 240 |
| SWLRPVVQWF MPHCTQSRAL VQEARDLINP LLERRREEKA EAERTGEKVT YNDAVEWLDD | 300 |
| LAREKGVGYD PACAQLSLSV AALHSTTDFF TQVMFDIAQN PELIEPLREE IIAVLGKQGW | 360 |
| SKNSLYNLKL IDSVLKESQR LKPIAIASMR RFTTHNVKLS DGVILPKNKL TLVSAHQHWD | 420 |
| PEYYKDPLKF DGYRFFNMRR EPGKESKAQL VSATPDHMGF GYGLHACPGR FFASEEIKIA | 480 |
| LSHILLKYDF KPVEGSSMEP RKYGLNMNAN PTAKLSVRRR KEEIAI | 526 |

SEQ ID NO: 91

| | |
|---|---|
| atgtccgcct tccaaaaaga aaccgttttg tctgttagac actggaccga atctttgttt | 60 |
| tcattcactg ctactagaga tccaggtttc agatttcaaa atggtcaatt cgccatgatc | 120 |
| ggtttggaag ttgaaggtaa accattgatg agagcttact ctatggcttc tgctaatcat | 180 |
| gaagaagcct tggaattctt ctcaatcaag gttcaagatg gtccattgac ttccagattg | 240 |
| caaaagatta gagaaggcga tatcatcttg gttggtagaa aagctactgg tactttgatt | 300 |
| accggtaact tgattccagg taagaggttg ttgttgttgt ctactggtac tggtttggct | 360 |
| ccatttgctt cattgattaa ggatccagat gtctacgaaa actacgaaac tatcgttttg | 420 |
| gctcatggtt gcagacaagt ttctgaattg gcttatggtg aacacttggt tgaaggtttg | 480 |
| agaaaccatg aatttttcgg tccattgatc agagacaagt tggtttatta cccaaccgtt | 540 |
| actagagagc cattcagaaa tagaggtaga atcaccgatt tgattgcctc taatcagttg | 600 |
| ttcgatgata ttggtcaagg tggtttggat atcgaaaccg atagaattat gttgtgtggt | 660 |
| tctccaggta tgttggaaga attgcatgct atgtttgctg ctagaggttt tgttgaaggt | 720 |
| aatcattctc aaccaggtca cttcgttatt gaaaaggctt tcgttcagag gtaa | 774 |

SEQ ID NO: 92

| | |
|---|---|
| MSAFQKETVL SVRHWTESLF SFTATRDPGF RFQNGQFAMI GLEVEGKPLM RAYSMASANH | 60 |
| EEALEFFSIK VQDGPLTSRL QKIREGDIIL VGRKATGILI TGNLIPGKRL LLLSTGTGLA | 120 |
| PFASLIKDPD VYENYETIVL AHGCRQVSEL AYGEHLVEGL RNHEFFGPLI RDKLVYYPTV | 180 |
| TREPFRNRGR ITDLIASNQL FDDIGQGGLD IETDRIMLCG SPGMLEELHA MFAARGFVEG | 240 |
| NHSQPGHFVI EKAFVQR | 257 |

SEQ ID NO: 93

| | |
|---|---|
| atgaagcaca tcgatgtcat gaacttcatc tccaagattt gctcttggtc taaagattct | 60 |
| ccaggtttcg ttttgttgat ctccatcttg gttatcttgg gttccgttac tttcattcca | 120 |
| aagtgtggta gaagatctgc ttttgatgct ttgccaatcg ttaacaagcc aaagtttggt | 180 |
| ccaatcttct ccattattgc taggtggaga ttcatccacc aatccaagaa aattttggaa | 240 |
| gagggtcaaa agtgctactc caatagacct tttagaattt ggactgattg gggtgaagtt | 300 |
| ttgatgttga ctccagatta tgcccacgaa attagaaacg atccacactt gtctttttca | 360 |
| ggtgccgtta agattgatgg tcatgctgat attccaggtt tcgaaactgt taagttgatc | 420 |
| tcccatccag acaacttgat tcaattggtt gctagaaagc aattgaccag acatttggct | 480 |
| gctgttattc aaccattgtc ctctgttact gaagaagcct tgattaagaa cttgggcaaa | 540 |
| tctcaagaat ggtccgaaat ctacttgaag tacgccgttt tggatattat cgccagattg | 600 |
| tcatctagga tctactttgg tgagttgttg taccaaaacg aagagtggtt gtctatcgtt | 660 |
| aagaattacg ctactcattt cttcaccgcc tcttccgatt tgagaaaagt tccatgggct | 720 |
| ttcagatctt tggttcattg gtttgttcca tcttgcagag ctttgagatt ggaaagatac | 780 |
| aacgctagaa gagttttgga accagttatc tctcaaagaa ggcaattgaa agaagctgct | 840 |
| aaaactgctg gtggtactcc attgcatttt gaagatgcta ttgaatgggc tgaagttgaa | 900 |
| gctagagtta agggtactaa gtacgatcca gttatcttcc aattgacctt gtccttgttg | 960 |
| gctattcata ccacttacga cttgttggaa atgtgcatga ttgatttggc taaaagacca | 1020 |
| gactgcatcg aggacttgag aaaagaagtt attaccgtct tgagaaagga tggttggaca | 1080 |
| aaaaatgcct tgtacaacat gaagttgttg gactccgcta tcaaagaatc ccaaagattg | 1140 |
| aaaccaggtt ccatcacttc tatgagaaga tacgctactt ccgatgtcca attgagagat | 1200 |
| ggtgttgttt tgaaaaaggg caacagattg aacgttttga ccttgcatag atccccagat | 1260 |
| ttgtttccat ctccagatac ttatgaccca tacaggttct acaacattag aggtcaacca | 1320 |
| ggtaaagaaa actgggctca attggtttct acctccgttg aacatatggg ttttggtcat | 1380 |
| ggtgaacatt cttgtccagg tagatttttt gctgccaacg aaatcaaagt tgccttggct | 1440 |
| catattttgg ttaagtacga ttggaagttg tccgatgaag ctggtggttg tactgaagtt | 1500 |
| aagggtatgg ttgaaaaagc tggttccaag gttaagatct tggtcagaca aagacaagat | 1560 |
| gtcgaatccg ttttggatga agcttga | 1587 |

SEQ ID NO: 94

| | |
|---|---|
| MKHIDVMNFI SKICSWSKDS PGFVLLISIL VILGSVTFIP KCGRRSAFDA LPIVNKPKFG | 60 |
| PIFSIIARWR FIHQSKKILE EGQKCYSNRP FRIWTDWGEV LMLTPDYAHE IRNDPHLSFS | 120 |
| GAVKIDGHAD IPGFETVKLI SHPDNLIQLV ARKQLTRHLA AVIQPLSSVT EEALIKNLGK | 180 |
| SQEWSEIYLK YAVLDIIARL SSRIYFGELL YQNEEWLSIV KNYATHFFTA SSDLRKVPWA | 240 |
| FRSLVHWFVP SCRALRLERY NARRVLEPVI SQRRQLKEAA KTAGGTPLHF EDAIEWAEVE | 300 |
| ARVKGTKYDP VIFQLTLSLL AIHTTYDLLE MCMIDLAKRP DCIEDLRKEV ITVLRKDGWT | 360 |
| KNALYNMKLL DSAIKESQRL KPGSITSMRR YATSDVQLRD GVVLKKGNRL NVLTLHRSPD | 420 |
| LFPSPDTYDP YRFYNIRGQP GKENWAQLVS TSVEHMGFGH GEHSCPGRFF AANEIKVALA | 480 |
| HILVKYDWKL SDEAGGCTEV KGMVEKAGSK VKILVRQRQD VESVLDEA | 528 |

SEQ ID NO: 95

| | |
|---|---|
| atggatgttc aagatacaac cgctgcttgt catgatgctt ttgctgaatt ggcttctcca | 60 |
| gcttgtattc aagatccata tcctttcatg agatggttga gagaacatga tccagttcat | 120 |
| agagctgctt caggtttgtt tttgttgtct agacatgctg atatctactg ggcttttaaa | 180 |
| gctactggtg atgcttttag aggtccagct ccatctgaat tggctagata ttttccaaga | 240 |
| gctgcctctt ctttgtcctt gaatttgttg gcttctacct tggctatgaa ggaaccacca | 300 |
| actcatacaa gattgagaag attgatctcc agagatttca ccgttggtca aattgataat | 360 |
| ttgaggccat ccattgctag aatcgttgct gctagattgg atggtatggc tccagctttg | 420 |
| gaaagaggtg aagctgttga cttgcataga gaatttgctt tggctttgcc aatgttggtt | 480 |
| tttgctgaac tatttggtat gccacaagac gacgtttttg aattgtctgc tatcgtttcc | 540 |
| gctatcttgg aaggtttgtc tccacatgct tcagatccac aattggctgc tgctgatgtt | 600 |
| gcttctgcta gagttaaggc ttatttcggt gatttgatct tgagaaagag agccgatcca | 660 |
| agaagagata tcgtttctac tttggttggt gctcatactg atgatgctga tactttgtct | 720 |
| gatgccgaat tgatttctat gttgtggggt atgttgttgg gtggttttgc tactactgct | 780 |
| gctactattg atcatgctgt tttggctatg ttggcttacc cagaagaaag acattggttg | 840 |
| caaggtgatg ctgctggtgt tgaagctttt gttgaagagg ttttgagatg tgaagctcca | 900 |
| gctatgtttt cctcaattcc aagaattgcc caaagggata ttgaattgca tggtgttgtt | 960 |
| attccaaagg atgccgatgt tagagttttg attgctgctg gtaatagaga tccagatgca | 1020 |
| tttgctgatc cagatagatt tgatccagtt aggttttacg gtactagacc aggtatgtca | 1080 |
| tctgatggta agatcatgtt gtctttcggt catggtattc atttctgttt gggtgctcaa | 1140 |
| ttggctagag ttcaattggc tgaatctttg ccacaaattc aagctagatt tccaactttg | 1200 |
| gctttggctg aacaacctac tagagaacca tctgcttttt tgagaacttt cagagctttg | 1260 |
| ccagttagat tgcatgctca agctgctgct gaagttagag ttgttgttga tcaagatttg | 1320 |
| tgtggtacta ccggtcaatg tgttttgact ttgccaggta cttttagaca aagggaacca | 1380 |
| gatggtgttg ctgaagtatg tatggctact gttccacaag ctttacatgc tgctgttaga | 1440 |
| ttggctgctt ctcaatgtcc agttgctgct attagagtta ttgaatctga agctggtgat | 1500 |
| gatcattgca ctaatccagg tccaacacca tctccagctg atgctgaaag acatgctgct | 1560 |
| aaagatttga gaaatccagg tgaacatgac ggcactattt ga | 1602 |

SEQ ID NO: 96

| | |
|---|---|
| MDVQDTTAAC HDAFAELASP ACIQDPYPFM RWLREHDPVH RAASGLFLLS RHADIYWAFK | 60 |
| ATGDAFRGPA PSELARYFPR AASSLSLNLL ASTLAMKEPP THTRLRRLIS RDFTVGQIDN | 120 |
| LRPSIARIVA ARLDGMAPAL ERGEAVDLHR EFALALPMLV FAELFGMPQD DVFELSAIVS | 180 |
| AILEGLSPHA SDPQLAAADV ASARVKAYFG DLILRKRADP RRDIVSTLVG AHTDDADTLS | 240 |
| DAELISMLWG MLLGGFATTA ATIDHAVLAM LAYPEERHWL QGDAAGVEAF VEEVLRCEAP | 300 |
| AMFSSIPRIA QRDIELHGVV IPKDADVRVL IAAGNRDPDA FADPDRFDPV RFYGTRPGMS | 360 |
| SDGKIMLSFG HGIHFCLGAQ LARVQLAESL PQIQARFPTL ALAEQPTREP SAFLRTFRAL | 420 |
| PVRLHAQAAA EVRVVVDQDL CGTTGQCVLT LPGTFRQREP DGVAEVCMAT VPQALHAAVR | 480 |
| LAASQCPVAA IRVIESEAGD DHCTNPGPTP SPADAERHAA KDLRNPGEHD GTI | 533 |

SEQ ID NO: 97

| | |
|---|---|
| atggttgttg ttgttgctgc agctatggct gctgcttctt tgtgttgtgg tgttgctgct | 60 |
| tacttgtatt acgttttgtg gttggctcca gaaagattga gagcacattt gagaaggcaa | 120 |
| ggtattggtg gtccaactcc atcttttcca tatggtaatt tggccgatat gagatcacat | 180 |
| gctgctgctg cagctggtgg taaagctact ggtgaaggta gacaagaggg tgatatagtt | 240 |
| catgattaca gacaagctgt gttcccattc tacgaaaatt ggagaaaaca atacggtcca | 300 |
| gtgttcactt actctgttgg taatatggtt ttcttgcacg tttccagacc agatatcgtt | 360 |
| agagaattgt ctttgtgcgt ttccttggac ttgggtaaat cttcttatat gaaggctacc | 420 |
| caccaacctt tgtttggtga aggtattttg aagtctaatg gtaacgcttg ggctcaccaa | 480 |
| agaaaattga ttgctccaga attcttccca gataaggtta agggtatggt tgatttgatg | 540 |
| gttgattccg ctcaagtctt ggtttcttca tgggaagata gaatcgatag atctggtggt | 600 |
| aatgccttgg atttgatgat cgatgatgat atcagagctt actccgccga tgttatttct | 660 |
| agaacttgtt tcggttcctc ctacgttaag ggtaagcaaa ttttcgacat gatcagagag | 720 |
| ttgcaaaaga ccgtttctac caagaagcaa aacttgttgg ctgaaatgac tggcttgtct | 780 |
| tttttgtttc caaaggcttc tggtagagct gcttggagat tgaatggtag agttagagct | 840 |
| ttgattttgg acttggttgg tgaaaatggt gaagaggatg gtggtaattt gttgtctgct | 900 |
| atgttgagat ctgctagagg tggtggtggt ggcggtggtg aagttgcagc tgctgctgaa | 960 |
| gattttgttg ttgataactg caagaacatc tacttcgctg gttatgaatc tactgctgtt | 1020 |
| actgctgctt ggtgtttgat gttgttggct ttacatccag aatggcaaga tagagttaga | 1080 |
| gatgaagttc aagctgcttg ttgcggtggt ggtggaagat ctccagattt tccagcttta | 1140 |
| caaaagatga agaacttgac catggtgatc caagaaactt tgagattata tccagctggt | 1200 |
| gccgttgttt ctagacaagc tttgagagaa ttatccttgg gtggtgttag agttccaaga | 1260 |
| ggtgttaata tctacgttcc agtttctacc ttgcatttgg atgctgaatt gtggggtggt | 1320 |
| ggtgctggtg ctgctgaatt tgatccagct agatttgctg atgctagacc accattgcat | 1380 |
| gcttatttgc catttggtgc cggtgctaga acatgtttgg gtcaaacttt tgctatggcc | 1440 |
| gaattgaagg ttttgttgtc tttggttttg tgcagattcg aagttgcttt gtctccagaa | 1500 |
| tatgttcatt ctccagctca caagttgatc gttgaagctg aacatggtgt tagattggtc | 1560 |
| ttgaagaaag tcagatctaa gtgtgattgg gctggtttcg attga | 1605 |

SEQ ID NO: 98

| | |
|---|---|
| MVVVVAAAMA AASLCCGVAA YLYYVLWLAP ERLRAHLRRQ GIGGPTPSFP YGNLADMRSH | 60 |
| AAAAAGGKAT GEGRQEGDIV HDYRQAVFPF YENWRKQYGP VFTYSVGNMV FLHVSRPDIV | 120 |
| RELSLCVSLD LGKSSYMKAT HQPLFGEGIL KSNGNAWAHQ RKLIAPEFFP DKVKGMVDLM | 180 |
| VDSAQVLVSS WEDRIDRSGG NALDLMIDDD IRAYSADVIS RTCFGSSYVK GKQIFDMIRE | 240 |
| LQKTVSTKKQ NLLAEMTGLS FLFPKASGRA AWRLNGRVRA LILDLVGENG EEDGGNLLSA | 300 |
| MLRSARGGGG GGGEVAAAAE DFVVDNCKNI YFAGYESTAV TAAWCLMLLA LHPEWQDRVR | 360 |
| DEVQAACCGG GGRSPDFPAL QKMKNLTMVI QETLRLYPAG AVVSRQALRE LSLGGVRVPR | 420 |
| GVNIYVPVST LHLDAELWGG GAGAAEFDPA RFADARPPLH AYLPFGAGAR TCLGQTFAMA | 480 |
| ELKVLLSLVL CRFEVALSPE YVHSPAHKLI VEAEHGVRLV LKKVRSKCDW AGFD | 534 |

SEQ ID NO: 99

| | |
|---|---|
| atggctcaat tggatacctt ggatatcgtt gttttggctg ctttgccatt gggtactgtt | 60 |
| gcttatttta ctaagggtac ttactgggct gtttctgctg atccatatgc taatccattg | 120 |
| actaatgcta atggtgctgc tagagctggt aagtccagaa acattattga aaagttggaa | 180 |
| gaatccgaca agaactgcgt tgttttttac ggttctcaaa ctggtactgc tgaagattat | 240 |
| gcttccaggt tgtctaaaga aggtcattct agattcggtt tgaacaccat ggttgctgat | 300 |
| ttggaagaat acgatttcga caacttggac tcattcccag aagataagtt ggctgttttt | 360 |
| gttttggcta cttatggtga aggtgaacct actgataatg ccgttgaatt ctacgaattc | 420 |
| atcggttccg aagatatcac tttttctgat ggtggttcca tcgatgataa gccattgtct | 480 |
| aagttgaact acgttgcttt tggtttgggt aacaacacct acgaacatta caactccatg | 540 |
| gttagaaacg tcgataagta cttgacaaag ttgggtgcta ctagattggg ttctgccggt | 600 |
| gaaggtgatg atggtgctgg tactatggaa gaagattttt tggcttggaa agaacctatg | 660 |
| tgggctgctg ttgctgaaaa gatgaatttg gaagaaagag aagctgaata cgaagccgtt | 720 |
| ttcgaagtta ctgaaaagcc agatttgaac gctcaagatg atactgttta tttgggtgag | 780 |
| ccaaacaaga accacttgga aggtaatcaa aagggtccat tcaatgctaa caacccattc | 840 |
| attgctccaa tcgttgaatc tcatgaacta ttcaccacca aagaaagaaa ctgcttgcac | 900 |
| atggaaatta gcattggtgg ttctaacttg tcttacacta ccggtgatca tattgctatt | 960 |
| tggccaaaca atgccggtaa agaagttgac agattcttca aggttttggg caaagaagat | 1020 |
| aagagacata ccgttattgc tgtcagaggt ttggatccaa ctgctaaagt tccatttcca | 1080 |
| tctccaacta cttatgatgc tgctgttaga ttccatttgg aaattggtgc tgctgtctct | 1140 |
| agacaattgg tttctactat tgctcaattc gccccaaacg aagatattaa ggctgaaatg | 1200 |
| gctaaattgg gttccgataa ggattacttc aagttgcaag ttaccgacag aaacttgaat | 1260 |
| ttggctcagt tgttggaaat ttgcggtaaa ggtcaaccat ggactaagat tccattctcc | 1320 |
| tttatgttcg aatccttgtt gaagattcag ccaaggtact actccatctc ttcttcatct | 1380 |
| ttggttcaga aggacaaggt ttctattacc gctgttgttg aatctttgga aagaccaggt | 1440 |
| gctccacatg ttttgaaagg tgttactacc aattacttgt tggccttgaa gcaaaagcaa | 1500 |
| catggtgatc caaatccaga tccacatggt ttgaattacg ctattactgg tccaagaaac | 1560 |
| aagtacgatg gtatccatgt tccagttcat gttagacact ctaacttcaa attgccatcc | 1620 |
| gatccatcta agccaatagt tatggttggt ccaggtactg gtgttgctcc ttttagaggt | 1680 |
| tttgttcaag aaagagctgc tcaagctaaa gctggtcata atgttggtaa gaccattttg | 1740 |
| ttcttcggtt gcagaaaagc ctctgaggat ttcttgtatc aaaatgaatg ggcccagtac | 1800 |
| aaagaagctt tgggagataa tttcgaaatc tacaccgctt tctctagaga tggtccaaaa | 1860 |
| aaggtttacg tccagaacca tttggaagaa catggtgaag aagttaacag gttgttggaa | 1920 |
| aaaaaggcct acttctacgt ttgtggtgat gctgctcata tggctagaga tgttaatacc | 1980 |
| ttgttgggca agttgatctc caagtacaga aatgtctctg aaactaaggg tgaagaaatc | 2040 |
| gttaaggcta tgagagcctc taatcagtac caagaagatg tttggtctta a | 2091 |

SEQ ID NO: 100

| | |
|---|---|
| MAQLDTLDIV VLAALPLGTV AYFTKGTYWA VSADPYANPL TNANGAARAG KSRNIIEKLE | 60 |
| ESDKNCVVFY GSQTGTAEDY ASRLSKEGHS RFGLNTMVAD LEEYDFDNLD SFPEDKLAVF | 120 |
| VLATYGEGEP TDNAVEFYEF IGSEDITFSD GGSIDDKPLS KLNYVAFGLG NNTYEHYNSM | 180 |
| VRNVDKYLTK LGATRLGSAG EGDDGAGTME EDFLAWKEPM WAAVAEKMNL EEREAEYEAV | 240 |
| FEVTEKPDLN AQDDTVYLGE PNKNHLEGNQ KGPFNANNPF IAPIVESHEL FTTKERNCLH | 300 |
| MEISIGGSNL SYTTGDHIAI WPNNAGKEVD RFFKVLGKED KRHTVIAVRG LDPTAKVPFP | 360 |
| SPTTYDAAVR FHLEIGAAVS RQLVSTIAQF APNEDIKAEM AKLGSDKDYF KLQVTDRNLN | 420 |
| LAQLLEICGK GQPWTKIPFS FMFESLLKIQ PRYYSISSSS LVQKDKVSIT AVVESLERPG | 480 |
| APHVLKGVTT NYLLALKQKQ HGDPNPDPHG LNYAITGPRN KYDGIHVPVH VRHSNFKLPS | 540 |
| DPSKPIVMVG PGTGVAPFRG FVQERAAQAK AGHNVGKTIL FFGCRKASED FLYQNEWAQY | 600 |
| KEALGDNFEI YTAFSRDGPK KVYVQNHLEE HGEEVNRLLE KKAYFYVCGD AAHMARDVNT | 660 |
| LLGKLISKYR NVSETKGEEI VKAMRASNQY QEDVWS | 696 |

SEQ ID NO: 101

| | |
|---|---|
| atgccaggta agattgaaaa cggtactcca aaggatttga aaaccggtaa cgattttgtt | 60 |
| tccgctgcta agtctttgtt ggatagagct tttaagtccc accattctta ctacggtttg | 120 |
| tgttctactt cttgccaagt ttatgatact gcttgggttg ctatgattcc aaagactaga | 180 |
| gataacgtca agcaatggtt gttcccagaa tgtttccact acttgttgaa aactcaagct | 240 |
| gctgatggtt cttggggttc tttgccaact actcaaactg ctggtatttt ggatactgct | 300 |
| tctgctgttt tggctttgtt gtgtcatgct caagaaccat tgcaaatctt ggatgtttct | 360 |
| ccagacgaaa tgggtttgag aattgaacat ggtgttacca gcttgaagag acaattggct | 420 |
| gtttggaatg atgtcgaaga taccaaccat atcggtgtcg aattcattat tccagccttg | 480 |
| ttgtccatgt tggaaaaaga attggatgtc ccatctttcg aattcccatg cagatctatt | 540 |
| ttggaaagaa tgcacggtga aaagttgggt catttcgatt tggaacaagt ttacggtaag | 600 |
| ccatcctctt tgttgcattc tttggaagct ttcttgggca agttggattt cgatagattg | 660 |
| tctcatcact tgtaccacgg ttctatgatg gcttctccat cttctactgc tgcttatttg | 720 |
| attggtgcta ctaagtggga tgatgaagct gaagattact tgagacacgt tatgagaaat | 780 |
| ggtgctggtc atggtaatgg tggtatttct ggtacttttc caactaccca tttcgaatgc | 840 |
| tcttggatta ttgctacctt gttgaaggtt ggtttcacct tgaaacaaat cgatggtgat | 900 |
| ggtttgagag gtttgtctac cattttgttg gaagctttga gagatgagaa cggtgttatt | 960 |
| ggttttgctc caagaactgc tgatgttgat gatactgcta aagctttgtt ggccttgtcc | 1020 |
| ttggttaatc aaccagtttc tccagatatc atgatcaagg ttttcgaagg taaggatcat | 1080 |
| ttcactacct tcggttctga aagagatcca tctttgactt ccaacttgca cgttttgttg | 1140 |
| tccttgttga agcagtctaa cttgtctcaa taccacccac aaattctaaa gactaccttg | 1200 |
| ttcacttgta gatggtggtg gggttctgat cattgtgtta aggataagtg gaacttgtct | 1260 |
| cacttgtacc caactatgtt gttggttgaa gctttcactg aagtcttgca tttgattgac | 1320 |
| ggtggtgaat tgtcctcttt gttcgatgaa tctttcaagt gcaagatcgg cttgtctatt | 1380 |
| ttccaagctg ttttgagaat catcttgacc caagataatg acggttcttg gagaggttat | 1440 |
| agagaacaaa cttgctacgc tatcttggct ttggttcaag ctagacatgt ttgtttcttc | 1500 |
| acccacatgg ttgatagatt gcaatcctgt gttgatagag gtttctcttg gttgaagtct | 1560 |
| tgctctttcc attcccaaga tttgacttgg acttctaaga ctgcttacga agttggtttt | 1620 |
| gttgctgaag cttacaaatt ggctgcttta caatctgcct ctttggaagt tccagctgct | 1680 |
| actattggtc attctgttac ttcagctgtt ccatcttctg atttggagaa gtacatgaga | 1740 |
| ttggttagaa agaccgcttt gttctctcca ttggatgaat ggggtttgat ggcctctatt | 1800 |
| atcgaatctt ctttcttcgt gccattgcta caagctcaaa gagttgaaat ctacccaaga | 1860 |
| gataacatca aggtcgacga agataagtac ttgtccatta ttccattcac ctgggttggt | 1920 |
| tgtaacaaca gatctagaac tttcgcttct aacagatggt tgtacgacat gatgtacttg | 1980 |
| tctttgttgg gttaccaaac cgatgagtat atggaagctg ttgctggtcc agtttttggt | 2040 |
| gatgtttctt tgttgcacca aaccatcgat aaggttattg ataacaccat gggtaacttg | 2100 |
| gctagagcta atggtactgt tcattctggt aatggtcatc aacatgagtc tccaaacatt | 2160 |
| ggtcaagttg aagatacttt gaccaggttc actaactctt ttttgaacca caaggatgtc | 2220 |
| ttgaactcct catcttctga tcaagatacc ttgagaagag aattcagaac cttcatgcat | 2280 |
| gcccatatta cccaaatcga agataactcc agattctcca aacaagcttc ttctgatgct | 2340 |
| ttctcatctc cagaacaatc ttacttccaa tgggttaatt ctaccggtgg ttctcatgtt | 2400 |
| gcttgtgctt attcttttgc tttctccaac tgtttgatgt ccgctaattt gttgcaaggt | 2460 |
| aaggatgctt ttccatccgg tactcaaaag tacttgatct cctctgttat gagacatgct | 2520 |
| accaacatgt gtagaatgta caacgatttc ggttccattg ctagagataa tgccgaaaga | 2580 |
| aacgttaact ccattcactt cccagaattc actttgtgta acggtacttc tcaaaacttg | 2640 |
| gacgaaagaa aagagaggtt gttgaagatt gctacctacg aacaaggtta cttggataga | 2700 |
| gcattggaag ccttggaaag acaatctaga gatgatgctg gtgatagagc tggttctaaa | 2760 |
| gatatgagaa agttgaagat cgtcaagttg ttctgtgatg ttaccgactt gtatgatcag | 2820 |
| ttgtacgtta tcaaggactt gtcctcttca atgaagtaa | 2859 |

SEQ ID NO: 102

| | |
|---|---|
| MPGKIENGTP KDLKTGNDFV SAAKSLLDRA FKSHHSYYGL CSTSCQVYDT AWVAMIPKTR | 60 |
| DNVKQWLFPE CFHYLLKTQA ADGSWGSLPT TQTAGILDTA SAVLALLCHA QEPLQILDVS | 120 |
| PDEMGLRIEH GVTSLKRQLA VWNDVEDTNH IGVEFIIPAL LSMLEKELDV PSFEFPCRSI | 180 |
| LERMHGEKLG HFDLEQVYGK PSSLLHSLEA FLGKLDFDRL SHHLYHGSMM ASPSSTAAYL | 240 |
| IGATKWDDEA EDYLRHVMRN GAGHGNGGIS GTFPTTHFEC SWIIATLLKV GFTLKQIDGD | 300 |
| GLRGLSTILL EALRDEGNIV GFAPRTADVD DTAKALLALS LVNQPVSPDI MIKVFEGKDH | 360 |
| FTTFGSERDP SLTSNLHVLL SLLKQSNLSQ YHPQILKTTL FTCRWWWGSD HCVKDKWNLS | 420 |
| HLYPTMLLVE AFTEVLHLID GGELSSLFDE SFKCKIGLSI FQAVLRIILT QDNDGSWRGY | 480 |
| REQTCYAILA LVQARHVCFF THMVDRLQSC VDRGFSWLKS CSFHSQDLTW TSKTAYEVGF | 540 |
| VAEAYKLAAL QSASLEVPAA TIGHSVTSAV PSSDLEKYMR LVRKTALFSP LDEWGLMASI | 600 |
| IESSFFVPLL QAQRVEIYPR DNIKVDEDKY LSIIPFTWVG CNNRSRTFAS NRWLYDMMYL | 660 |
| SLLGYQTDEY MEAVAGPVFG DVSLLHQTID KVIDNTMGNL ARANGTVHSG NGHQHESPNI | 720 |
| GQVEDTLTRF TNSVLNHKDV LNSSSSDQDT LRREFRTFMH AHITQIEDNS RFSKQASSDA | 780 |
| FSSPEQSYFQ WVNSTGGSHV ACAYSFAFSN CLMSANLLQG KDAFPSGTQK YLISSVMRHA | 840 |
| TNMCRMYNDF GSIARDNAER NVNSIHFPEF TLCNGTSQNL DERKERLLKI ATYEQGYLDR | 900 |
| ALEALERQSR DDAGDRAGSK DMRKLKIVKL FCDVTDLYDQ LYVIKDLSSS MK | 952 |

SEQ ID NO: 103

| | |
|---|---|
| atgcacattt tgacttaccc atccggtaag attgaaaacg gtactccaaa ggatttgaaa | 60 |
| accggtaacg attttgtttc cgctgctaag tctttgttgg atagagcttt taagtcccac | 120 |
| cattcttact acggtttgtg ttctacttct tgccaagttt atgatactgc ttgggttgct | 180 |
| atgattccaa agactagaga taacgtcaag caatggttgt tcccagaatg tttccactac | 240 |
| ttgttgaaaa ctcaagctgc tgatggttct tggggttctt tgccaactac tcaaactgct | 300 |
| ggtattttgg atactgcttc tgctgttttg gctttgttgt gtcatgctca agaaccattg | 360 |
| caaatcttgg atgtttctcc agacgaaatg ggtttgagaa ttgaacatgg tgttaccagc | 420 |
| ttgaagagac aattggctgt ttggaatgat gtcgaagata ccaaccatat cggtgtcgaa | 480 |
| ttcattattc cagccttgtt gtccatgttg gaaaaagaat tggatgtccc atctttcgaa | 540 |
| ttcccatgca gatctatttt ggaaagaatg cacggtgaaa agttgggtca tttcgatttg | 600 |
| gaacaagttt acggtaagcc atcctctttg ttgcattctt tggaagcttt cttgggcaag | 660 |
| ttggatttcg atagattgtc tcatcacttg taccacggtt ctatgatggc ttctccatct | 720 |
| tctactgctg cttatttgat tggtgctact aagtgggatg atgaagctga agattacttg | 780 |
| agacacgtta tgagaaatgg tgctggtcat ggtaatggtg gtatttctgg tacttttcca | 840 |
| actacccatt tcgaatgctc ttggattatt gctactttgt tgaagggtgg tttcaccttg | 900 |
| aaacaaattg atggtgatgg tttgagaggc ttgtctacca ttttgttgga agctttgaga | 960 |
| gatgagaacg gtgttattgg ttttgctcca agaactgctg atgttgatga tactgctaaa | 1020 |
| gctttgttgg ccttgtcctt ggttaatcaa ccagtttctc cagatatcat gatcaagggt | 1080 |
| tttgaaggta aggatcattt cactaccttc ggttctgaaa gagatccatc tttgacttcc | 1140 |
| aacttgcacg ttttgttgtc tttgccaggt aagcaatcta acttgtctca ataccatcca | 1200 |
| cagatcttga aaactacctt gttcacttgt agatggtggt ggggttctga tcattgtgtt | 1260 |
| aaggataagt ggaacttgtc tcacttgtac ccaactatgt tgttggttga agctttcact | 1320 |
| gaagtcttgc atttgattga cggtggtgaa ttgtcctctt tgttcgatga atctttcaag | 1380 |
| tgcaagatcg gcttgtctat tttccaagct gttttgagaa tcatcttgac ccaagataat | 1440 |
| gacggttctt ggagaggtta tagagaacaa acttgctacg ctatcttggc tttggttcaa | 1500 |
| gctagacatg tttgtttctt cacccacatg gttgatagat tgcaatcctg tgttgataga | 1560 |
| ggtttctctt ggttgaagtc ttgctctttc cattcccaag atttgacttg gacttctaag | 1620 |
| actgcttacg aagttggttt tgttgctgaa gcttacaaat tggctgcttt acaatctgcc | 1680 |
| tctttggaag ttccagctgc tactattggt cattctgtta cttcagctgt tccatcttct | 1740 |
| gatttggaga agtacatgag attggttaga aagaccgctt tgttctctcc attggatgaa | 1800 |
| tggggtttga tggcctctat tatcgaatct tctttcttcg tgccattgct acaagctcaa | 1860 |
| agagttgaaa tctacccaag agataacatc aaggtcgacg aagataagta cttgtccatt | 1920 |
| attccattca cctgggttgg ttgtaacaac agatctagaa ctttcgcttc taacagatgg | 1980 |
| ttgtacgaca tgatgtactt gtctttgttg ggttaccaaa ccgatgagta tatggaagct | 2040 |
| gttgctggtc cagtttttgg tgatgtttct ttgttgcacc aaaccatcga taaggttatt | 2100 |
| gataacacca tgggtaactt ggctagagct aatggtactg ttcattctgg taatggtcat | 2160 |
| caacatgagt ctccaaacat tggtcaagtt gaagatactt tgaccaggtt cactaactct | 2220 |
| gttttgaacc acaaggatgt cttgaactcc tcatcttctg atcaagatac cttgagaaga | 2280 |
| gaattcagaa ccttcatgca tgcccatatt acccaaatcg aagataactc cagattctcc | 2340 |
| aaacaagctt cttctgatgc tttctcatct ccagaacaat cttacttcca atgggttaat | 2400 |
| tctaccggtg gttctcatgt tgcttgtgct tattcttttg ctttctccaa ctgtttgatg | 2460 |
| tccgctaatt tgttgcaagg taaggatgct tttccatccg gtactcaaaa gtacttgatc | 2520 |
| tcctctgtta tgagacatgc taccaacatg tgtagaatgt acaacgattt cggttccatt | 2580 |
| gctagagata atgccgaaag aaacgttaac tccattcact tcccagaatt cactttgtgt | 2640 |
| aacggtactt ctcaaaactt ggacgaaaga aaagagaggt tgttgaagat tgctacctac | 2700 |
| gaacaaggtt acttggatag agcattggaa gccttggaaa gacaatctag agatgatgct | 2760 |
| ggtgatagag ctggttctaa agatatgaga aagttgaaga tcgtcaagtt gttctgtgat | 2820 |
| gttaccgact t tatgatca gttgtacgtt atcaaggact tgtcctcttc aatgaagtaa | 2880 |

SEQ ID NO: 104

| | |
|---|---|
| MHILTYPSGK IENGTPKDLK TGNDFVSAAK SLLDRAFKSH HSYYGLCSTS CQVYDTAWVA | 60 |
| MIPKTRDNVK QWLFPECFHY LLKTQAADGS WGSLPTTQTA GILDTASAVL ALLCHAQEPL | 120 |
| QILDVSPDEM GLRIEHGVTS LKRQLAVWND VEDTNHIGVE FIIPALLSML EKELDVPSFE | 180 |
| FPCRSILERM HGEKLGHFDL EQVYGKPSSL LHSLEAFLGK LDFDRLSHHL YHGSMMASPS | 240 |
| STAAYLIGAT KWDDEAEDYL RHVMRNGAGH GNGGISGTFP TTHFECSWII ATLLKGGFTL | 300 |
| KQIDGDGLRG LSTILLEALR DENGVIGFAP RTADVDDTAK ALLALSLVNQ PVSPDIMIKG | 360 |
| FEGKDHFTTF GSERDPSLTS NLHVLLSLPG KQSNLSQYHP QILKTTLFTC RWWWGSDHCV | 420 |
| KDKWNLSHLY PTMLLVEAFT EVLHLIDGGE LSSLFDESFK CKIGLSIFQA VLRIILTQDN | 480 |
| DGSWRGYREQ TCYAILALVQ ARHVCFFTHM VDRLQSCVDR GFSWLKSCSF HSQDLTWTSK | 540 |
| TAYEVGFVAE AYKLAALQSA SLEVPAATIG HSVTSAVPSS DLEKYMRLVR KTALFSPLDE | 600 |
| WGLMASIIES SFFVPLLQAQ RVELYPRDNI KVDEDKYLSI IPFTWVGCNN RSRTFASNRW | 660 |
| LYDMMYLSLL GYQTDEYMEA VAGPVFGDVS LLHQTIDKVI DNTMGNLARA NGTVHSGNGH | 720 |
| QHESPNIGQV EDTLTRFTNS VLNHKDVLNS SSSDQDTLRR EFRTFMHAHI TQIEDNSRFS | 780 |
| KQASSDAFSS PEQSYFQWVN STGGSHVACA YSFAFSNCLM SANLLQGKDA FPSGTQKYLI | 840 |
| SSVMRHATNM CRMYNDFGSI ARDNAERNVN SIHFPEFTLC NGTSQNLDER KERLLKIATY | 900 |
| EQGYLDRALE ALERQSRDDA GDRAGSKDMR KLKIVKLFCD VTDLYDQLYV IKDLSSSMK | 959 |

SEQ ID NO: 105

| | |
|---|---|
| atgttggaag gtattggtat cggttcttct ccacaatctt tgttggattc tgccaaggat | 60 |
| ttgattgctg aagcttgttc tagaaccgat ccattttatg gtttgtctac cgcttcttgt | 120 |
| caaacttatg atactgcttg ggttgccatg gttgttaaga gattggaatc tggtgaagat | 180 |
| gcttgggctt tcccacaatc ttttaggtat attttggaag cccaaacttc tggtggtggt | 240 |
| tggggtgatc caaaagcttc taaaactgtt ggtattttgg ataccgctgc tgctttgttg | 300 |
| gcattataca gacatttgga tagaccattg caaatcaccg aagttaccag aatggatgtc | 360 |
| gaatccagaa ttgaaaaggc ttctacctct ttggtgtccc aattgcaaca atgggatgat | 420 |
| ttggttgaat ccaaccatat cggtgtcgaa ttgattttgc cttccttgtt ggaacaattg | 480 |
| agacaaatca atccagtctt gcactctact agattcaagg ctgaacaaga tttgaccaga | 540 |
| atgcacgaag aaaagttgag acacttcgat gtctctagct tgtattcttc tagaccatct | 600 |
| tctgccttgc attctttgga agcttttttg ggtaaattgg acttcgatag agttggtcat | 660 |
| cacttgtatc atggttctat gatggcttct ccatcttcta ctgctgctta tttgattggt | 720 |
| gcttctactt acgattctac cgctgaagct tacttgtccc atattttgaa atgtaccgct | 780 |
| aaaggttctc caggtggtat tccaggtact ttcccaatta ctaatttcga atactcctgg | 840 |
| attaccgcca ctttgttgag agattgcttt gcttatgaag atttggctgg tccatctttg | 900 |
| gattgcattg gtcaaacttt ggaagaagct ttacaagctg gtaagggtgt tattggtttt | 960 |
| gctccaagaa ctgctgatgt tgatgatact gctaaaggtt tgttggcttt gacctctatg | 1020 |
| agaagatatg gtcatgctga tccaaagcca atgatcaagg ttttcgaaag agaagatcat | 1080 |
| ttcaccacct tcggttctga aagagatcca tcttttacct ctaactgcca cgttttgttg | 1140 |
| tctttgttgg ctcaagaatc tgacttgcca ttatacagag cccaaatcta caaggctact | 1200 |
| aagttcttgt gtgacttctt gttctatagg gatggtccat tgaaagataa gtggcatatg | 1260 |
| acttcatcct acccatctat gttgttggtt gaagcttttt ccgagttgtt gagattgcaa | 1320 |
| gacgaacaaa agttcgaaca gttgttgacc tctgatgaac aacacagagt tttcatcgtt | 1380 |
| ttgttccaaa cctgtttgag aaccttgttg gtccaatctg aagatggttc ttggtctggt | 1440 |
| tgtactgaac aaacttctca tgctgtatgt actttggcta gagcttggag attgaacttg | 1500 |
| ttcattgact taagaccaga cttgcaagtt gctattcaag ccggtattca atacttggat | 1560 |
| agacctgaag ctcaaatggg tcaaaactgg acttctaaga ctgtttactc cgttgatttg | 1620 |
| gttggtaagg cttacatttt ggctgctaga aaaatggccc aagatttgtc tgatagaact | 1680 |
| ccatttggtc ctaagaggga agatttcatg tctttgaaga agttcaccac ctacttggaa | 1740 |
| acctctaaaa gattgccatt attgcaagct actccacctt ggcaaattat tgcttctttg | 1800 |
| actgaatccg ctttgttctt gcctttgttg aggaaagaaa aagaagccat ctttccaagg | 1860 |
| gatggtacta tgttgactcc agatgattac ttggatatca ttccatacac ctgggttatt | 1920 |
| tgcggtaaca gaattgatgt tcatacctct ccatctttgg ccttggatat gatgttgttg | 1980 |
| tctatgtacg gttaccagaa cgacgaattc tttgaaactc atgctatggc tggtcattac | 2040 |
| caatctggtt ctgatttgaa gagattggtt gatgatgtct tgcaacagaa cattccaaaa | 2100 |
| tgtgctgaac catctaacgg ttcttctaaa catgatactg gtaaccagtc tagaactgct | 2160 |
| caagaagctg ctatttcttt gccagaaatg tctgctggtt tgaacagatt catctcctac | 2220 |
| atcttgaaac atccattggt tgctcaagct catccaaact ctaaatccga attgcacaga | 2280 |
| gaattgcaag ctttcttgca tgctcattct gatcaatctg acgaaaacag aagattcgct | 2340 |
| gcccaagaag aaaaagacga attgcaatct ccatcccaaa ccttgtttca atacgttaga | 2400 |
| tctactggtg gtgatcatgt tgcttgtgct tactctttgt ctttcatgtt gtgcatcatc | 2460 |
| tcttcatcct tgtgtgatgg tggtgaagtt tttcaaactg ccgaagaaaa gtatttggct | 2520 |
| gctgctgctg caagacattt ggctactatg tgtagaatct acaacgacta tggttccttg | 2580 |
| gctagagata ctgctgaaag aaatgttaac tccatgcact acccagaatt cagacaaact | 2640 |
| actgctcaag ctgaagatcc aactatggct aaaaagaagg ctttgttgtc attgggtgaa | 2700 |
| tacgaacacg atttcttgag agataccttg gacagattgg aaaaagctgt tgctactcca | 2760 |
| ccaccaggtg gtatggttga atctaaaaga ttaagagtcg tcaggttgtt cagatacttc | 2820 |
| tgtgatgtta ctgacttgta cgatcagttg tacgtcttga aggatttgtc ctcttcattg | 2880 |
| agaacctaa | 2889 |

SEQ ID NO: 106

| | |
|---|---|
| MLEGIGIGSS PQSLLDSAKD LIAEACSRTD PFYGLSTASC QTYDTAWVAM VVKRLESGED | 60 |
| AWAFPQSFRY ILEAQTSGGG WGDPKASKTV GILDTAAALL ALYRHLDRPL QITEVTRMDV | 120 |
| ESRIEKASTS LVSQLQQWDD LVESNHIGVE LILPSLLEQL RQINPVLHST RFKAEQDLTR | 180 |
| MHEEKLRHFD VSSLYSSRPS SALHSLEAFL GKLDFDRVGH HLYHGSMMAS PSSTAAYLIG | 240 |
| ASTYDSTAEA YLSHILKCTA KGSPGGIPGT FPITNFEYSW ITATLLRDCF AYEDLAGPSL | 300 |
| DCIGQTLEEA LQAGKGVIGF APRTADVDDT AKGLLALTSM RRYGHADPKP MIKVFEREDH | 360 |
| FTTFGSERDP SFTSNCHVLL SLLAQESDLP LYRAQIYKAT KFLCDFLFYR DGPLKDKWHM | 420 |
| TSSYPSMLLV EAFSELLRLQ DEQKFEQLLT SDEQHRVFIV LFQTCLRTLL VQSEDGSWSG | 480 |
| CTEQTSHAVC TLARAWRLNL FIDLRPDLQV AIQAGIQYLD RPEAQMGQNW TSKTVYSVDL | 540 |
| VGKAYILAAR KMAQDLSDRT PFGPKREDFM SLKKFTTYLE TSKRLPLLQA TPPWQIIASL | 600 |
| TESALFLPLL RKEKEAIFPR DGTMLTPDDY LDIIPYTWVI CGNRIDVHTS PSLALDMMLL | 660 |
| SMYGYQNDEF FETHAMAGHY QSGSDLKRLV DDVLQQNIPK CAEPSNGSSK HDTGNQSRTA | 720 |
| QEAAISLPEM SAGLNRFISY ILKHPLVAQA HPNSKSELHR ELQAFLHAHS DQSDENRRFA | 780 |
| AQEEKDELQS PSQTLFQYVR STGGDHVACA YSLSFMLCII SSSLCDGGEV FQTAEEKYLA | 840 |
| AAAARHLATM CRIYNDYGSL ARDTAERNVN SMHYPEFRQT TAQAEDPTMA KKKALLSLGE | 900 |
| YEHDFLRDTL DRLEKAVATP PPGGMVESKR LRVVRLFRYF CDVTDLYDQL YVLKDLSSSL | 960 |
| RT | 962 |

SEQ ID NO: 107

| | |
|---|---|
| atgtacgaga ggtacttgtt gttgttgcat atcttgactc acaagtccgg taagattgaa | 60 |
| aatggtactc caaagtactt gaaaaccggt gatgatttgg tttctgctgc taagtctttg | 120 |
| ttggatagag ctttcaagtc ccatcattct tactacggtt tgtgttctac ctcttgccaa | 180 |
| gtttatgata ctgcttgggt tgccatgatt agaaagacta ctgaaaatgt caagcactgg | 240 |
| ttgttcccag aatgtttcca ttacttgttg aaaacccaag ctgctgatgg ttcttggggt | 300 |
| gctttgccaa ctactcaaac tgctggtatt ttggatactg cttctgctgt tttggctttg | 360 |
| ttgtctcatg ttagaaagcc attgcaaatc ttggatgttt ccccagacga aattggtcca | 420 |
| agaattgaac atggtgttgc ctcattgaaa agacaattgg ctgtttggaa ggacgtcgaa | 480 |
| gaaactaatc atatcggtgt tgaattgatc gttccagcct tgttgtctac cttggaaaaa | 540 |
| gaattgggtg agtcctcttt tgaattccca tgtaagggta tcttggagaa gatgtacgaa | 600 |
| gaaaagttgg gtaacttcga cttgaagaag gtttacggta aaccatcctc tttgttgcat | 660 |
| tctttggaag ctttcttggg tcaaatcgat ttcgatagat tgtcccatca cttgtacaga | 720 |
| ggttctatga tggcttctcc atcttctact gctgcttatt tgattggtgc tactaagtgg | 780 |
| gatgatgaag ctgaagatta cttgagacac atcgttagaa atggtgctgg tcatggtgat | 840 |
| ggtggtattt ctggtacttt tccaactacc catttcgaat gctcttggat tttggctact | 900 |
| ttgttgcaag gtggtttcac catgaagcaa attgattcta atggtttgag aggtttggct | 960 |
| accattttgg ctgatgcttt gagagatgag aatggtgtta ttggttttgc tccaagaact | 1020 |
| gccgatgttg atgatactgc taaagctttg ttggccttgt ccttgatcaa tcaaccagtt | 1080 |
| tctccagaca tcatgatcaa ggtttttgaa ggtaaggatc acttcactac cttcggttct | 1140 |
| gaaagagatc catctttgac ttccaacttg catgttttgt tgtgcttgtt gaagcagcca | 1200 |
| aacgtttctc aataccatcc acaaattcta aagaccacct tgttcacttg tagatggtgg | 1260 |
| tggggttctg atcattgtgt taaggataag tggaacttgt ctcacttgta cccaactatg | 1320 |
| ttgttggttg aagctttcac tgaagtcttg catttgattg atgctggtga gttgtcatcc | 1380 |
| ttgttcgata agtctttgaa gtgcaagatc ggcttgtcta ttttccaagc tgttttgaga | 1440 |
| atcatcttga cccaagataa tgacggttct tggagagctt atagagaaca aacttgctac | 1500 |
| gctatcttgg ctttggttca agctagacat gtttgtttct tcacccacat ggttgataga | 1560 |
| ttgcagtctt gtattgatag aggtgtctct tggttgaagt cctgtagatt tcattcccaa | 1620 |
| gatttgactt ggacttctaa gactgcttac gaagttggtt ttgttgctga agcttacaaa | 1680 |
| ttggctgctt tacaatctgc ctctttggaa gttccagctg ctactattgg tcattctgtt | 1740 |
| acttcagctg ttccatcttc tgatttggag aagtacatga gattggttag aaagaccgct | 1800 |
| ttgttctctc cattggatga atggggtttg agagcttctg ttatcgaatc ttctttcttc | 1860 |
| gtgccattat tgcaagccca aagagttgaa atctacccaa gagataacat caagatcgat | 1920 |
| gaggacaagt atttgagcat tattccattc acttgggtcg gttgtaacaa cagatctaga | 1980 |
| acttttgctt ccaacagatg gttgtacgac atgatgtatt tgtccttgtt gggttaccaa | 2040 |
| accgatgagt atatggaagc tgttgctggt ccagtttttt ccgatgtttc tttgttgaga | 2100 |
| ttggccatcg ataaggttat tgataacacc agagttaact tggctggtac aaatggtact | 2160 |
| gttcataatg gtaacggtca ccaacatgaa tccccaaaca ttagacaagt tgaagatacc | 2220 |
| ttgaccagat tcgctaactc tgttttgaac cacaaggatg tcttgaactc ctcatcttct | 2280 |
| gatcaagaca ctttgagaag agaattcaga gcttttatgc atgctcatac cacccaaatc | 2340 |
| gaagataact ctagattctc taagcaagcc tctggtgatg ttttttcatc tccagaacaa | 2400 |
| tcctacttcc aatgggttaa ttctactggt ggttctcatg ttgcttgtgc ttactctttt | 2460 |
| gctttctcta actgtttgat gtccgctaat ttgccacaag gtaaagaagc ttttccatct | 2520 |
| gctacacaga agtacttgat ctcttctgtt atgagacatg ctaccaacat gtgcagaatg | 2580 |
| tacaatgatt tcggttccat tgccagagat aacgttgaaa gaaacgttaa ctctatgcac | 2640 |
| ttcccagaat tcgctttgtg taagggtatt tcccaaacca tcgatgacag aaagaagaga | 2700 |
| ttgtcccaaa ttgccatgta cgaacaaggt tgtttggata gagcattgga agctttggaa | 2760 |
| agacaatcta gagatgatgc cggtgattct gctggttcta aagatgttag aaagatcaag | 2820 |
| atcgtcaagt tgttctgtga agttaccgac ttgtatgatc agttgtacgt tatcaaggac | 2880 |
| ttgtcctctt caatgaagta a | 2901 |

SEQ ID NO: 108

| | |
|---|---|
| MYERYLLLLH ILTHKSGKIE NGTPKYLKTG DDLVSAAKSL LDRAFKSHHS YYGLCSTSCQ | 60 |
| VYDTAWVAMI RKTTENVKHW LFPECFHYLL KTQAADGSWG ALPTTQTAGI LDTASAVLAL | 120 |
| LSHVRKPLQI LDVSPDEIGP RIEHGVASLK RQLAVWKDVE ETNHIGVELI VPALLSTLEK | 180 |
| ELGESSFEFP CKGILEKMYE EKLGNFDLKK VYGKPSSLLH SLEAFLGQID FDRLSHHLYR | 240 |
| GSMMASPSST AAYLIGATKW DDEAEDYLRH IVRNGAGHGD GGISGTFPTT HFECSWILAT | 300 |
| LLQGGFTMKQ IDSNGLRGLA TILADALRDE NGVIGFAPRT ADVDDTAKAL LALSLINQPV | 360 |
| SPDIMIKVFE GKDHFTTFGS ERDPSLTSNL HVLLCLLKQP NVSQYHPQIL KTTLFTCRWW | 420 |
| WGSDHCVKDK WNLSHLYPTM LLVEAFTEVL HLIDAGELSS LFDKSLKCKI GLSIFQAVLR | 480 |
| IILTQDNDGS WRAYREQTCY AILALVQARH VCFFTHMVDR LQSCIDRGVS WLKSCRFHSQ | 540 |
| DLTWTSKTAY EVGFVAEAYK LAALQSASLE VPAATIGHSV TSAVPSSDLE KYMRLVRKTA | 600 |
| LFSPLDEWGL RASVIESSFF VPLLQAQRVE IYPRDNIKID EDKYLSIIPF TWVGCNNRSR | 660 |
| TFASNRWLYD MMYLSLLGYQ TDEYMEAVAG PVFSDVSLLR LAIDKVIDNT RVNLAGTNGT | 720 |
| VHNGNGHQHE SPNIRQVEDT LTRFANSVLN HKDVLNSSSS DQDTLRREFR AFMHAHTTQI | 780 |
| EDNSRFSKQA SGDVFSSPEQ SYFQWVNSTG GSHVACAYSF AFSNCLMSAN LPQGKEAFPS | 840 |
| ATQKYLISSV MRHATNMCRM YNDFGSIARD NVERNVNSMH FPEFALCKGI SQTIDDRKKR | 900 |
| LSQIAMYEQG CLDRALEALE RQSRDDAGDS AGSKDVRKIK IVKLFCEVTD LYDQLYVIKD | 960 |
| LSSSMK | 966 |

SEQ ID NO: 109

| | |
|---|---|
| atgaagactg tattgcaacc agataagcac tcccacaagt tgattttgtc atctcaacaa | 60 |
| ccagttccaa ctccatctca tccacaagat gttttggtta aggttcatgc tacttgtcca | 120 |
| tgtaagggtg aattggattg ggctttgtgg gctccagaat tcattggtga taagattcca | 180 |
| attccaggtc aagatttggc tggtactgtt gtttctgctc cagaaaattc tggtttcaag | 240 |
| ccagatgatg aagtttacgc tagaattgaa gctaatagac caggtgctgc tgctgaatat | 300 |
| gttttggcta gagtttctga attggccatc agaccaaaga atttgacttg ggctgaaact | 360 |
| gctgcttctc caatttctgc tttgactgct tatcaaggtt tgttcactag aggtggttta | 420 |
| gatccaaaag ctttggctgg tgatgaagct gctagagaaa aaaatggtaa ggtcagagtt | 480 |
| ttgatcaacg gttctgctgg tggtgttggt tcttgggctg ttcaattggc tagattggct | 540 |
| ggtgttaaga ctattgccgg tgttgttggt actcaaaaca tcgattttgt cagacaattg | 600 |
| ggtgctaccg aaaccattga ttacaaaaag caatccattg gtgaatgggc tactcaagat | 660 |
| ccatcttcta gacaattcga tttggttttc gattgcatcg gtttgccatc tttgtctcaa | 720 |
| acttggtatg ctgttagaga aggtggtact ttggtttctg tttgtgctcc accagaacaa | 780 |
| aacagaccag aagatgttaa gaaagaagtc aactccatct tcttcgttat cgatccagtt | 840 |
| ggtaaggatt tggaagttat caccaagttg ttggaagctg gtcaaatcaa gccacatatc | 900 |
| gattctgttg ttggtttgga tgatttcgaa gaagcttggg aaaaagtcga atctggtaga | 960 |
| actaagggta aggttgttgt tatggttatg aaggacgagt aa | 1002 |

SEQ ID NO: 110

| | |
|---|---|
| MKTVLQPDKH SHKLILSSQQ PVPTPSHPQD VLVKVHATCP CKGELDWALW APEFIGDKIP | 60 |
| IPGQDLAGTV VSAPENSGFK PDDEVYARIE ANRPGAAAEY VLARVSELAI RPKNLTWAET | 120 |
| AASPISALTA YQGLFTRGGL DPKALAGDEA AREKNGKVRV LINGSAGGVG SWAVQLARLA | 180 |
| GVKTIAGVVG TQNIDFVRQL GATETIDYKK QSIGEWATQD PSSRQFDLVF DCIGLPSLSQ | 240 |
| TWYAVREGGT LVSVCAPPEQ NRPEDVKKEV NSIFFVIDPV GKDLEVITKL LEAGQIKPHI | 300 |
| DSVVGLDDFE EAWEKVESGR TKGKVVVMVM KDE | 333 |

SEQ ID NO: 111

| | |
|---|---|
| atgggtagat tcgaaggtaa ggttgctgtt gttactggtg ctggtgctgg tattggtaaa | 60 |
| gcttgtgctt tggctattgc tagagaaggt ggtagagttg ttgttgctga tattgatggt | 120 |
| tctgctgcta ttgcttgtac tgctcaaatt gctgctgaag ctggtcatgc tttggcttta | 180 |
| gctattgata ttgctgatgc tcaagctgtt gctgctttgt ttgaaactgc tgaaagacat | 240 |
| tttggtggtg ttgatttgtt ggttaacaac gcttctgcta tgcatttgac tccaagagat | 300 |
| agagccattt tggaattgga attggctgtt tgggatcaaa ctatggctag aaatttgagg | 360 |
| ggtactttgt tgtgttgcag acaagctatt ccaagaatga ttgctagagg tggtggtgct | 420 |
| atagttaaca tgtcatcttg tcaaggtttg tctggtgata ctgctttgac ttcttatgct | 480 |
| gcttctaagg ctgctatgaa catgttgtca tcttcattgg ctactcaata cggtcatgct | 540 |
| caaattagat gtaatgctgt tgctccaggt ttgatcatga ctgaaagatt gagaatgcaa | 600 |
| acccatttga gaaggcacca attattgcca agagttggta gaccaagaac ttggccaaga | 660 |
| tggtggagat cttgttctcc aactatgttg agatcttcta ctggtcaagt tgtctgtatt | 720 |
| gatggtggta tgttggctca tgttccaact tatgctgatg gtggtaattc tagagctgct | 780 |
| agaccagctg gtgaaacagc tgaagctgat gctgctccaa gatgttaa | 828 |

SEQ ID NO: 112

| | |
|---|---|
| MGRFEGKVAV VTGAGAGIGK ACALAIAREG GRVVVADIDG SAAIACTAQI AAEAGHALAL | 60 |
| AIDIADAQAV AALFETAERH FGGVDLLVNN ASAMHLTPRD RAILELELAV WDQTMARNLR | 120 |
| GTLLCCRQAI PRMIARGGGA IVNMSSCQGL SGDTALTSYA ASKAAMNMLS SSLATQYGHA | 180 |
| QIRCNAVAPG LIMTERLRMQ THLRRHQLLP RVGRPRTWPR WWRSCSPTML RSSTGQVVCI | 240 |
| DGGMLAHVPT YADGGNSRAA RPAGETAEAD AAPRC | 275 |

SEQ ID NO: 113

| | |
|---|---|
| atgtccttcc cagatgaaca aaaggttgat ttccaaacct tccagaacgt tatcaacaat | 60 |
| caattgtctc caacctccga atccagacat ggtatttgtc catctactga agaatccttg | 120 |
| tgggaatctc cagtttctac tcaagatgat gttgatagag ctgtttctgc tgctaaagct | 180 |
| gcttatccag cttggagaaa attgtcttgg gacgaaagag cttcttactt ggttaagttt | 240 |
| gctgatgcta ttgaagccca caagcaagaa ttcattgatt tgttgggtag agaagctggt | 300 |
| aaaccaccac aagctggtgg ttttgaattg atgttggtta tggaacacgt tagggaaact | 360 |
| ccaaagttga gaattggtga agttaagcca gaagataacg aagatagaac cgctgttgtt | 420 |
| agatacgttc caattggtgt tggtgttggt atagttccat ggaattttcc aatgttgttg | 480 |
| ggtattggta aagcttaccc agctatgttg gctggtaata cttttatttg gaagccatct | 540 |
| ccatacaccc catactctgc tttgaaattg gctgaaattg gtgctaaagt tttgccacca | 600 |
| ggtgttttac aagctttgtc tggtggtgat gatttgggtc caatgttgac tgctcatcca | 660 |
| gatgttgcta aggtttcttt tactggttct actgaaaccg gtaaaaagat tatggctgct | 720 |
| tgtgctgcta ctttgaagag agttactttg gaattgggtg gtaatgatgc tgctatcgtt | 780 |
| tgtgaagatg ttgatattcc aggtgttgct ggtaaggttg cttttttggc ttatgttcat | 840 |
| tctggtcaga tctgcatgaa catcaagaga atctacgttc acgaatccat ctacgacaag | 900 |
| ttcgtttccg aagttatcaa gttcttgcat gctttgaaaa ccggtgattt ctctgatcca | 960 |
| gaagcttttt ttggtccaat ccaaaacaag atgcagtacg aaaaattgca gaggttgtac | 1020 |
| gaacaaatcg ataagcaagg ttggaagtgt gcttttggtt ctgcttctcc agctacttct | 1080 |
| gaaaaaggtt attttgttcc accagtcttg gttgataatc caccagaaga ttctgaaatc | 1140 |
| gtccaaatgg aaccatttgg tccaatagtt ccagttatga agtggcaatc tgaagatgat | 1200 |
| gttattgcta gagctaacgc ttctgattat ggtttgggtg cttctgtttg gtctaaagat | 1260 |
| gttgctagag caagaagaat ggctgaatta ttggaagctg gttctgtttg ggttaacacc | 1320 |
| cattttgaag ttgctccaaa tgttcctttt ggtggtcata agcaatctgg tattggtatg | 1380 |
| gattggggtg aagttggttt gaaaggttgg tgtaatccac aagcttattg ggtcaaacat | 1440 |
| tccggttaa | 1449 |

SEQ ID NO: 114

| | |
|---|---|
| MSFPDEQKVD FQTFQNVINN QLSPTSESRH GICPSTEESL WESPVSTQDD VDRAVSAAKA | 60 |
| AYPAWRKLSW DERASYLVKF ADAIEAHKQE FIDLLGREAG KPPQAGGFEL MLVMEHVRET | 120 |
| PKLRIGEVKP EDNEDRTAVV RYVPIGVGVG IVPWNFPMLL GIGKAYPAML AGNTFIWKPS | 180 |
| PYTPYSALKL AEIGAKVLPP GVLQALSGGD DLGPMLTAHP DVAKVSFTGS TETGKKIMAA | 240 |
| CAATLKRVIL ELGGNDAAIV CEDVDIPGVA GKVAFLAYVH SGQICMNIKR IYVHESIYDK | 300 |
| FVSEVIKFLH ALKTGDFSDP EAFFGPIQNK MQYEKLQRLY EQIDKQGWKC AFGSASPATS | 360 |
| EKGYFVPPVL VDNPPEDSEI VQMEPFGPIV PVMKWQSEDD VIARANASDY GLGASVWSKD | 420 |
| VARARRMAEL LEAGSVWVNT HFEVAPNVPF GGHKQSGIGM DWGEVGLKGW CNPQAYWVKH | 480 |
| SG | 482 |

SEQ ID NO: 115

| | |
|---|---|
| atgggtagat tcgaaggtaa agttgctgtc gtcactggtg ctggtgccgg tattggtaag | 60 |
| gcttgtgcct tggctattgc tagagaaggt ggtcgtgttg tcgtcgccga catcgatggt | 120 |
| tccgctgcta tcgcttgtac tgctcaaatc gctgctgaag ctggtcatgc tttggctttg | 180 |
| gctatcgata tcgctgatgc tcaagccgtc gccgccttat tcgaaaccgc cgaaagacat | 240 |
| ttcggtggtg ttgacttgtt ggttaataac gcttccgcta tgcacttgac tcctagagac | 300 |
| agagctattt tagaattgga attggctgtt tgggatcaaa ccatggctac caacttgaga | 360 |
| ggtactttgt tgtgctgtcg tcaagccatc cctcgtatga ttgctagagg tggtggtgct | 420 |
| atcgttaaca tgtcttcttg tcaaggttta tctggtgaca ccgctttgac ttcctacgct | 480 |
| gcttctaagg ccgccatgaa catgttgtcc tcttctttgg ccacccaata tggtcacgcc | 540 |
| caaatcagat gtaacgccgt tgctccaggt ttaatcatga ctgaaagatt gttggctaaa | 600 |
| ttggatgctt gtatgcaaac tcatttgaga agacaccaat tgttgccaag agtcggtaga | 660 |
| cctgaagacg ttgctgcctt ggttgctttt ttgttatctg acgacgctgc tttcatcact | 720 |
| ggtcaagttg tctgtatcga tggtggtatg ttggctcacg ttccaaccta cgctgacggt | 780 |
| ggtaactctc gtgctgccag accagctggt gaaactgctg aagccgatgc tgctccaaga | 840 |
| tgctaa | 846 |

SEQ ID NO: 116

| | |
|---|---|
| MGRFEGKVAV VTGAGAGIGK ACALAIAREG GRVVVADIDG SAAIACTAQI AAEAGHALAL | 60 |
| AIDIADAQAV AALFETAERH FGGVDLLVNN ASAMHLTPRD RAILELALAV WDQTMATNLR | 120 |
| GTLLCCRQAI PRMIARGGGA IVNMSSCQGL SGDTALTSYA ASKAAMNMLS SSLATQYGHA | 180 |
| QIRCNAVAPG LIMTERLLAK LDACMQTHLR RHQLLPRVGR PEDVAALVAF LLSDDAAFIT | 240 |
| GQVVCIDGGM LAHVPTYADG GNSRAARPAG ETAEADAAPR C | 281 |

SEQ ID NO: 117

| | |
|---|---|
| atgagagttg ttatcgatca agatttgtgt ggtactactg gtcaatgtgt cttgactttg | 60 |
| ccaggtactt ttagacaaag agaaccagac ggtgtcgccg aagtctgtgt tgctactgtc | 120 |
| ccacaagctt tacacgctgc tgctagattg gctgcttccc aatgtcctgt tgctgccatt | 180 |
| cgtgtcatcg agtctgacgc tggtgaaaga gcctctgctg atccagctcc atccccagct | 240 |
| caagccgaaa gacatgctgc taaggatcaa agaaatccag gtggtagatt cgaaggtaag | 300 |
| gttgctgttg tcaccggtgc tggtgctggt attggtaaag cttgtgcttt agccattgct | 360 |
| agagaaggtg gtagagttgt tgtcgctgat atcgacggtt ctgctgccgt cgcctgtact | 420 |
| gcccaaatcg ccgccgaggc tggtcatgct ttggctttgg ccatggatat tgctgatgcc | 480 |
| caagccgttg ctgctttgtt cgaaactgct gaaagacact ttggtggtgt tgatttgttg | 540 |
| gtcaacaacg cttctgctat gcacttgacc ccaagagata gaactatttt ggacttggac | 600 |
| ttggctgtct gggaccaaac catggctact aatttgcgtg gtaccttgtt gtgttgtaga | 660 |
| caagctatcc cacgtatgat cgcccgtggt ggtggtgcta tcgtcaacat gtcttcttgt | 720 |
| caaggtttat ctggtgacac cgctcaaact tcttacgctg cctctaaggc tgctatgaac | 780 |
| atgttgtccg cttctttggc tacccaatac ggtcacgctc aaattcgttg taacgctgtc | 840 |
| gctccaggtt tgattatgac tgaaagatta ttagctaagt tagatgaatg tatgcaaaga | 900 |
| cacttatcca gacaccaatt gttgcaacgt gtcggtagac cagaagatgt tgctgccttg | 960 |
| gtcgcttttt tattatctga cgacgctgct ttcattactg gtcaagtctt gtgtattgat | 1020 |
| ggtggtatgt tggctcacgt tccaacctac gctgacggtg gtaactctag agctgctaga | 1080 |
| ccagccggtg atactgccaa ggccgctgct ggtccaagat gttaa | 1125 |

SEQ ID NO: 118

| | |
|---|---|
| MRVVIDQDLC GTTGQCVLTL PGTFRQREPD GVAEVCVATV PQALHAAARL AASQCPVAAI | 60 |
| RVIESDAGER ASADPAPSPA QAERHAAKDQ RNPGGRFEGK VAVVTGAGAG IGKACALAIA | 120 |
| REGGRVVVAD IDGSAAVACT AQIAAEAGHA LALAMDIADA QAVAALFETA ERHFGGVDLL | 180 |
| VNNASAMHLT PRDRTILDLD LAVWDQTMAT NLRGTLLCCR QAIPRMIARG GGAIVNMSSC | 240 |
| QGLSGDTAQT SYAASKAAMN MLSASLATQY GHAQIRCNAV APGLIMTERL LAKLDECMQR | 300 |
| HLSRHQLLQR VGRPEDVAAL VAFLLSDDAA FITGQVLCID GGMLAHVPTY ADGGNSRAAR | 360 |
| PAGDTAKAAA GPRC | 374 |

SEQ ID NO: 119

| | |
|---|---|
| atggacgctg tcactggttt gttgactgtc ccagctactg ctatcaccat cggtggtacc | 60 |
| gctgttgctt tggctgtcgc cttgatcttt tggtacttaa aatccgatat gttgttgaat | 120 |
| ccattgaaca gaagacatag attgagacat gacatcccag ttgttccagg tgccttccca | 180 |
| ttggttggtc acttgcctgc tgttgtttgc gatttgccta gattattgag aagagctgaa | 240 |
| cgtaccttgg gttctcactt ctggttagat ttcggtccag ctggtcattt gatgacttct | 300 |
| ttggacccag atgctttggc tttgttgaga cacaaggacg tctcttccgg tttaattgaa | 360 |
| gatattgctc cagaattatt cggtggtact ttggtcgctc aagacggtat tgctcacaga | 420 |
| caagccagag acgctattca agctgccttg ttgcctaagg gtttaacttt ggctggtatc | 480 |
| ggtgaattgt tcgccccagt tattagagcc agagtccaaa gatggagaga aagaggtgat | 540 |
| gtcactatct tgagagaaac cggtgatttg atgttaaagt tgattttctc cttgatgggt | 600 |
| atccctgctc aagatttgcc tggttggcac agaaagtacc gtcaattatt gcaattgatc | 660 |
| gtcgctccac ctgtcgactt gccaggtttg ccattgagaa gaggtagagc cgctagagac | 720 |
| tggatcgacg ccagattgag agaatttgtc agagctgctc gtgagcacgc ctctcgtacc | 780 |
| ggtttaatca atgatatggt ttctgctttc gacagatccg acgacgcctt gtctgacgat | 840 |
| gttttggtcg ctaacatcag attgttgttg ttaggtggtc acgacaccac cgcttccact | 900 |
| atggcttgga tggttattga attggctcgt caaccaggtt tgtgggatgc tttagttgaa | 960 |
| gaagctcaaa gagttggtgc tgttccaact cgtcatgctg acttggctca atgtccagtt | 1020 |
| gccgaagcct tattcagaga aactttaaga gttcacccag ccactccatt attggtcaga | 1080 |
| agagctttga gagaattgag aatcggtcaa caacgtatcc caaccggtac tgacttgtgt | 1140 |
| attccattgt tgcacttctc cacctccgct ttgttgcatg aagctccaga tcaatttaga | 1200 |
| ttggctagat ggttacaaag aaccgaacca atcagaccag ttgatatgtt acaattcggt | 1260 |
| actggtccac acttttgtat gggttaccac ttagtttggt tggaattggt tcaattctgt | 1320 |
| attgctttgg ctttgaccat gcacgaagct ggtgttagac ctagattgtt atccggtgtt | 1380 |
| gaaaagggta gaagatatta cccaaccgcc catccatcca tgaccattag aattggtttt | 1440 |
| tcttaa | 1446 |

SEQ ID NO: 120

| | |
|---|---|
| MDAVTGLLTV PATAITIGGT AVALAVALIF WYLKSDMLLN PLNRRHRLRH DIPVVPGAFP | 60 |
| LVGHLPAVVC DLPRLLRRAE RTLGSHFWLD FGPAGHLMTS LDPDALALLR HKDVSSGLIE | 120 |
| DIAPELFGGT LVAQDGIAHR QARDAIQAAL LPKGLTLAGI GELFAPVIRA RVQRWRERGD | 180 |
| VTILRETGDL MLKLIFSLMG IPAQDLPGWH RKYRQLLQLI VAPPVDLPGL PLRRGRAARD | 240 |
| WIDARLREFV RAAREHASRT GLINDMVSAF DRSDDALSDD VLVANIRLLL LGGHDTTAST | 300 |
| MAWMVIELAR QPGLWDALVE EAQRVGAVPT RHADLAQCPV AEALFRETLR VHPATPLLVR | 360 |
| RALRELRIGQ QRIPTGIDLC IPLLHFSTSA LLHEAPDQFR LARWLQRTEP IRPVDMLQFG | 420 |
| TGPHFCMGYH LVWLELVQFC IALALTMHEA GVRPRLLSGV EKGRRYYPTA HPSMTIRIGF | 480 |
| S | 481 |

SEQ ID NO: 121

| | |
|---|---|
| atgttgttga atccattgaa cagaagacat agattgagac atgacatccc agttgttcca | 60 |
| ggtgccttcc cattggttgg tcacttgcct gctgttgttt gcgatttgcc tagattattg | 120 |
| agaagagctg aacgtacctt gggttctcac ttctggttag atttcggtcc agctggtcat | 180 |
| ttgatgactt ctttggaccc agatgctttg gctttgttga gacacaagga cgtctcttcc | 240 |
| ggtttaattg aagatattgc tccagaatta ttcggtggta ctttggtcgc tcaagacggt | 300 |
| attgctcaca gacaagccag agacgctatt caagctgcct tgttgcctaa gggtttaact | 360 |
| ttggctggta tcggtgaatt gttcgcccca gttattagag ccagagtcca aagatggaga | 420 |
| gaaagaggtg atgtcactat cttgagagaa accggtgatt tgatgttaaa gttgattttc | 480 |
| tccttgatgg gtatccctgc tcaagatttg cctggttggc acagaaagta ccgtcaatta | 540 |
| ttgcaattga tcgtcgctcc acctgtcgac ttgccaggtt tgccattgag aagaggtaga | 600 |
| gccgctagag actggatcga cgccagattg agagaatttg tcagagctgc tcgtgagcac | 660 |
| gcctctcgta ccggtttaat caatgatatg gtttctgctt tcgacagatc cgacgacgcc | 720 |
| ttgtctgacg atgttttggt cgctaacatc agattgttgt tgttaggtgg tcacgacacc | 780 |
| accgcttcca ctatggcttg gatggttatt gaattggctc gtcaaccagg tttgtgggat | 840 |
| gctttagttg aagaagctca aagagttggt gctgttccaa ctcgtcatgc tgacttggct | 900 |
| caatgtccag ttgccgaagc cttattcaga gaaactttaa gagttcaccc agccactcca | 960 |
| ttattggtca gaagagcttt gagagaattg agaatcggtc aacaacgtat cccaaccggt | 1020 |
| actgacttgt gtattccatt gttgcacttc tccacctccg ctttgttgca tgaagctcca | 1080 |
| gatcaattta gattggctag atggttacaa agaaccgaac caatcagacc agttgatatg | 1140 |
| ttacaattcg gtactggtcc acacttttgt atgggttacc acttagtttg gttggaattg | 1200 |
| gttcaattct gtattgcttt ggctttgacc atgcacgaag ctggtgttag acctagattg | 1260 |
| ttatccggtg ttgaaaaggg tagaagatat tacccaaccg cccatccatc catgaccatt | 1320 |
| agaattggtt tttcttaa | 1338 |

SEQ ID NO: 122

| | |
|---|---|
| MLLNPLNRRH RLRHDIPVVP GAFPLVGHLP AVVCDLPRLL RRAERTLGSH FWLDFGPAGH | 60 |
| LMTSLDPDAL ALLRHKDVSS GLIEDIAPEL FGGTLVAQDG IAHRQARDAI QAALLPKGLT | 120 |
| LAGIGELFAP VIRARVQRWR ERGDVTILRE TGDLMLKLIF SLMGIPAQDL PGWHRKYRQL | 180 |
| LQLIVAPPVD LPGLPLRRGR AARDWIDARL REFVRAAREH ASRTGLINDM VSAFDRSDDA | 240 |
| LSDDVLVANI RLLLLGGHDT TASTMAWMVI ELARQPGLWD ALVEEAQRVG AVPTRHADLA | 300 |
| QCPVAEALFR ETLRVHPATP LLVRRALREL RIGQQRIPTG TDLCIPLLHF STSALLHEAP | 360 |
| DQFRLARWLQ RTEPIRPVDM LQFGTGPHFC MGYHLVWLEL VQFCIALALT MHEAGVRPRL | 420 |
| LSGVEKGRRY YPTAHPSMTI RIGFS | 445 |

SEQ ID NO: 123

| | |
|---|---|
| atggatgctg tcaccggttt gttaaccgtt ccagctaccg ctattaccat cggtggtacc | 60 |
| gctgtcgcct tagctgttgc tttgattttc tggtacttaa agtcttctga acaacaacct | 120 |
| ttgccaacct tgccaatgtg gagagttgac cacattgaac cttctccaga aatgttggct | 180 |
| ttgagagcta atggtcctat ccatcgtgtt cgtttcccat ctggtcacga aggttggtgg | 240 |
| gtcaccggtt atgacgaagc taaggctgtt ttgtccgatg ccgccttccg tcctgctggt | 300 |
| atgcctccag ctgctttcac tccagactct gtcattttgg gttctccagg ttggttagtc | 360 |
| tctcacgaag gtagagaaca tgctagattg cgtgctattg ttgctccagc tttctctgat | 420 |
| agaagagtta aattgttggt ccaacaagtc gaagccattg ctgcccactt gttcgagact | 480 |
| ttagctgccc aacctcaacc tgccgatttg agaagacact tgtctttccc tttaccagcc | 540 |
| atggttattt ctgccttaat gggtgtctta tacgaggacc acgctttctt tgctggtttg | 600 |
| tctgacgaag ttatgactca ccaacatgaa tccggtccac gttctgcttc tagattggcc | 660 |
| tgggaggaat tgagagccta cattagaggt aagatgagag acaagagaca agacccagac | 720 |
| gataacttgt taactgattt gttggctgct gtcgatcaag gtaaggcttc cgaagaagaa | 780 |
| gctgttggtt tggccgctgg tatgttggtt gctggtcatg aatctactgt tgcccaaatc | 840 |
| gaatttggtt tgttggccat gttcagacac ccacaacaaa gagaaagatt agttggtgat | 900 |
| ccatctttgg ttgacaaggc tgttgaggaa attttgagaa tgtatccacc aggtgctggt | 960 |
| tgggatggta tcatgcgtta cccaagaact gatgttacta tcgctggtga acacattcca | 1020 |
| gccgaatcca aggttttggt cggtttgcca gctacctcct tcgatccaca ccactttgac | 1080 |
| gatccagaaa tcttcgacat cgaaagacaa gaaaaaccac acttagcctt ttcctacggt | 1140 |
| cctcacgctt gtatcggtgt tgctttggct agattggagt tgaaggttgt cttcggttct | 1200 |
| attttccaaa gattgcctgc tttacgttta gccgttgctc cagaacaatt gaagttgaga | 1260 |
| aaggaaatca tcaccggtgg ttttgaacaa ttcccagttt tgtggtaa | 1308 |

SEQ ID NO: 124

| | |
|---|---|
| MDAVTGLLTV PATAITIGGT AVALAVALIF WYLKSSEQQP LPTLPMWRVD HIEPSPEMLA | 60 |
| LRANGPIHRV RFPSGHEGWW VTGYDEAKAV LSDAAFRPAG MPPAAFTPDS VILGSPGWLV | 120 |
| SHEGREHARL RAIVAPAFSD RRVKLLVQQV EAIAAHLFET LAAQPQPADL RRHLSFPLPA | 180 |
| MVISALMGVL YEDHAFFAGL SDEVMTHQHE SGPRSASRLA WEELRAYIRG KMRDKRQDPD | 240 |
| DNLLTDLLAA VDQGKASEEE AVGLAAGMLV AGHESTVAQI EFGLLAMFRH PQQRERLVGD | 300 |
| PSLVDKAVEE ILRMYPPGAG WDGIMRYPRT DVTIAGEHIP AESKVLVGLP ATSFDPHHFD | 360 |
| DPEIFDIERQ EKPHLAFSYG PHACIGVALA RLELKVVFGS IFQRLPALRL AVAPEQLKLR | 420 |
| KEIITGGFEQ FPVLW | 435 |

SEQ ID NO: 125

| | |
|---|---|
| atggacgctg ttaccggttt gttgactgtt ccagctactg ctatcaccat tggtggtact | 60 |
| gctgttgctt tggctgtcgc tttaatcttc tggtatttaa agtccgacgt tcaagaaacc | 120 |
| actgctgctt gcagagacgc tttcgctgaa ttagcttccc cagcttgtat tcacgatcct | 180 |
| tacccattca tgagatggtt gcgtgaacac gacccagttc acagagctgc ctctggtttg | 240 |
| ttcttgttgt ccagacatgc tgatatcttt tgggctttca aggccaccgg tgatgctttc | 300 |
| agaggtccag ctccaggtga gttggctaga tacttttcta gagctgccac ctctccatcc | 360 |
| ttgaacttgt tggcctctac tttggctatg aaggatccac ctacccacac cagattgaga | 420 |
| agattgattt ctagagactt cactatgggt caaatcgaca acttgagacc atccattgcc | 480 |
| agaatcgttg ccgctagatt agatggtatt actccagcct tggaaagagg tgaagctgtc | 540 |
| gacttgcaca gagaatttgc tttggcctta cctatgttgg ttttcgctga attgtttggt | 600 |
| atgcctcaag atgatatgtt tgagttagct gccggtatcg gtactatttt ggaaggtttg | 660 |
| ggtccacatg cttctgatcc acaattggct gctgccgacg ctgcttctgc tagagtccaa | 720 |
| gcttacttcg gtgatttgat ccaaagaaaa cgtaccgatc ctagaagaga catcgtctcc | 780 |
| atgttggttg gtgctcacga tgacgatgcc gatactttgt ctgacgctga attaatttct | 840 |
| atgttgtggg gtatgttgtt aggtggtttc gttaccactg ctgcctccat cgatcatgct | 900 |
| gttttggcta tgttggctta tccagaacaa agacattggt tacaagctga cgctgctaga | 960 |
| gttagagctt ttgttgaaga agttttaaga tgtgacgctc cagctatgtt ttcctccatt | 1020 |
| ccaagaattg ctcaaagaga tatcgaattg ggtggtgtcg tcattcctaa gaacgctgac | 1080 |
| gttagagtct taatcgcctc cggtaacaga gatccagacg cttttgctga tccagataga | 1140 |
| ttcgatccag ctagattcta tggtacctcc ccaggtatgt ctactgacgg taaaattatg | 1200 |
| ttatctttcg gtcatggtat ccacttctgc ttaggtgccc aattggccag agtccaattg | 1260 |
| gctgaatctt tgcctagaat tcaagctaga tttccaactt tggcttttgc tggtcaacca | 1320 |
| accagagaac catccgcttt cttaagaact ttccgtactt tgccagtcag attgcatgcc | 1380 |
| caaggttcct aa | 1392 |

SEQ ID NO: 126

| | |
|---|---|
| MDAVTGLLTV PATAITIGGT AVALAVALIF WYLKSDVQET TAACRDAFAE LASPACIHDP | 60 |
| YPFMRWLREH DPVHRAASGL FLLSRHADIF WAFKATGDAF RGPAPGELAR YESRAATSPS | 120 |
| LNLLASTLAM KDPPTHTRLR RLISRDFTMG QIDNLRPSIA RIVAARLDGI TPALERGEAV | 180 |
| DLHREFALAL PMLVFAELFG MPQDDMFELA AGIGTILEGL GPHASDPQLA AADAASARVQ | 240 |
| AYFGDLIQRK RTDPRRDIVS MLVGAHDDDA DTLSDAELIS MLWGMLLGGF VTTAASIDHA | 300 |
| VLAMLAYPEQ RHWLQADAAR VRAFVEEVLR CDAPAMFSSI PRIAQRDIEL GGVVIPKNAD | 360 |
| VRVLIASGNR DPDAFADPDR FDPARFYGTS PGMSTDGKIM LSFGHGIHFC LGAQLARVQL | 420 |
| AESLPRIQAR FPTLAFAGQP TREPSAFLRT FRTLPVRLHA QGS | 463 |

SEQ ID NO: 127

| | |
|---|---|
| atgtctgaac aacaaccttt gccaaccttg ccaatgtgga gagttgacca cattgaacct | 60 |
| tctccagaaa tgttggcttt gagagctaat ggtcctatcc atcgtgttcg tttcccatct | 120 |
| ggtcacgaag gttggtgggt caccggttat gacgaagcta aggctgtttt gtccgatgcc | 180 |
| gccttccgtc ctgctggtat gcctccagct gctttcactc cagactctgt cattttgggt | 240 |
| tctccaggtt ggttagtctc tcacgaaggt agagaacatg ctagattgcg tgctattgtt | 300 |
| gctccagctt tctctgatag aagagttaaa ttgttggtcc aacaagtcga agccattgct | 360 |
| gcccacttgt tcgagacttt agctgcccaa cctcaacctg ccgatttgag aagacacttg | 420 |
| tctttccctt taccagccat ggttatttct gccttaatgg gtgtcttata cgaggaccac | 480 |
| gctttctttg ctggtttgtc tgacgaagtt atgactcacc aacatgaatc cggtccacgt | 540 |
| tctgcttcta gattggcctg ggaggaattg agagcctaca ttagaggtaa gatgagagac | 600 |
| aagagacaag acccagacga taacttgtta actgatttgt tggctgctgt cgatcaaggt | 660 |
| aaggcttccg aagaagaagc tgttggtttg gccgctggta tgttggttgc tggtcatgaa | 720 |
| tctactgttg cccaaatcga atttggtttg ttggccatgt tcagacaccc acaacaaaga | 780 |
| gaaagattag ttggtgatcc atctttggtt gacaaggctg ttgaggaaat tttgagaatg | 840 |
| tatccaccag gtgctggttg ggatggtatc atgcgttacc caagaactga tgttactatc | 900 |
| gctggtgaac acattccagc cgaatccaag gttttggtcg gtttgccagc tacctccttc | 960 |
| gatccacacc actttgacga tccagaaatc ttcgacatcg aaagacaaga aaaaccacac | 1020 |
| ttagcctttt cctacggtcc tcacgcttgt atcggtgttg ctttggctag attggagttg | 1080 |
| aaggttgtct tcggttctat tttccaaaga ttgcctgctt tacgtttagc cgttgctcca | 1140 |
| gaacaattga agttgagaaa ggaaatcatc accggtggtt ttgaacaatt cccagttttg | 1200 |
| tggtaa | 1206 |

SEQ ID NO: 128

| | |
|---|---|
| MSEQQPLPTL PMWRVDHIEP SPEMLALRAN GPIHRVRFPS GHEGWWVTGY DEAKAVLSDA | 60 |
| AFRPAGMPPA AFTPDSVILG SPGWLVSHEG REHARLRAIV APAFSDRRVK LLVQQVEAIA | 120 |
| AHLFETLAAQ PQPADLRRHL SFPLPAMVIS ALMGVLYEDH AFFAGLSDEV MTHQHESGPR | 180 |
| SASRLAWEEL RAYIRGKMRD KRQDPDDNLL TDLLAAVDQG KASEEEAVGL AAGMLVAGHE | 240 |
| STVAQIEFGL LAMFRHPQQR ERLVGDPSLV DKAVEEILRM YPPGAGWDGI MRYPRIDVTI | 300 |
| AGEHIPAESK VLVGLPATSF DPHHFDDPEI FDIERQEKPH LAFSYGPHAC IGVALARLEL | 360 |
| KVVFGSIFQR LPALRLAVAP EQLKLRKEII TGGFEQFPVL W | 401 |

SEQ ID NO: 129

| | |
|---|---|
| atgttgtcca gacatgctga tatcttttgg gctttcaagg ccaccggtga tgctttcaga | 60 |
| ggtccagctc caggtgagtt ggctagatac ttttctagag ctgccacctc tccatccttg | 120 |
| aacttgttgg cctctacttt ggctatgaag gatccaccta cccacaccag attgagaaga | 180 |
| ttgatttcta gagacttcac tatgggtcaa atcgacaact tgagaccatc cattgccaga | 240 |
| atcgttgccg ctagattaga tggtattact ccagccttgg aaagaggtga agctgtcgac | 300 |
| ttgcacagag aatttgcttt ggccttacct atgttggttt tcgctgaatt gtttggtatg | 360 |
| cctcaagatg atatgtttga gttagctgcc ggtatcggta ctattttgga aggtttgggt | 420 |
| ccacatgctt ctgatccaca attggctgct gccgacgctg cttctgctag agtccaagct | 480 |
| tacttcggtg atttgatcca aagaaaacgt accgatccta gaagagacat cgtctccatg | 540 |
| ttggttggtg ctcacgatga cgatgccgat actttgtctg acgctgaatt aatttctatg | 600 |
| ttgtggggta tgttgttagg tggtttcgtt accactgctg cctccatcga tcatgctgtt | 660 |
| ttggctattt tggcttatcc agaacaaaga cattggttac aagctgacgc tgctagagtt | 720 |
| agagcttttg ttgaagaagt tttaagatgt gacgctccag ctatgttttc ctccattcca | 780 |
| agaattgctc aaagagatat cgaattgggt ggtgtcgtca ttcctaagaa cgctgacgtt | 840 |
| agagtcttaa tcgcctccgg taacagagat ccagacgctt ttgctgatcc agatagattc | 900 |
| gatccagcta gattctatgg tacctcccca ggtatgtcta ctgacggtaa aattatgtta | 960 |
| tctttcggtc atggtatcca cttctgctta ggtgcccaat tggccagagt ccaattggct | 1020 |
| gaatctttgc ctagaattca agctagattt ccaactttgg cttttgctgg tcaaccaacc | 1080 |
| agagaaccat ccgctttctt aagaactttc cgtactttgc cagtcagatt gcatgcccaa | 1140 |
| ggttcctaa | 1149 |

SEQ ID NO: 130

| | |
|---|---|
| MLSRHADIFW AFKATGDAFR GPAPGELARY FSRAATSPSL NLLASTLAMK DPPTHTRLRR | 60 |
| LISRDFTMGQ IDNLRPSIAR IVAARLDGIT PALERGEAVD LHREFALALP MLVFAELFGM | 120 |
| PQDDMFELAA GIGTILEGLG PHASDPQLAA ADAASARVQA YFGDLIQRKR TDPRRDIVSM | 180 |
| LVGAHDDDAD TLSDAELISM LWGMLLGGFV TTAASIDHAV LAMLAYPEQR HWLQADAARV | 240 |
| RAFVEEVLRC DAPAMFSSIP RIAQRDIELG GVVIPKNADV RVLIASGNRD PDAFADPDRF | 300 |
| DPARFYGTSP GMSTDGKIML SFGHGIHFCL GAQLARVQLA ESLPRIQARF PTLAFAGQPT | 360 |
| REPSAFLRTF RTLPVRLHAQ GS | 382 |

SEQ ID NO: 131

| | |
|---|---|
| atgatccaaa ccgaaagagc cgttcaacaa gttttggaat ggggtagatc tttgactggt | 60 |
| tttgctgatg aacatgctgt tgaagctgtt agaggtggtc agtacatctt gcaaagaatt | 120 |
| catccatctt tgagaggtac atctgctaga actggtagag atccacaaga cgaaactttg | 180 |
| atcgttacct tctatagaga attggccttg ttgttttggt tggatgattg caatgatttg | 240 |
| ggcttgattt ccccagaaca attggctgct gttgaacaag ctttgggtca aggtgttcca | 300 |
| tgtgctttgc caggttttga aggttgtgct gttttgagag cttctttggc tactttggct | 360 |
| tacgatagaa gagattatgc tcagttgttg gatgatacca gatgttattc tgctgcttta | 420 |
| agagctggtc atgctcaagc tgttgctgct gaaagatggt cttatgctga atacttgcat | 480 |
| aacggtattg actccattgc ttacgctaac gttttctgtt gtttgtcttt gttgtggggt | 540 |
| ttggatatgg ctactttgag agctagacca gcttttagac aagtcttgag attgatttcc | 600 |
| gccatcggta gattgcaaaa tgacttgcat ggttgcgata aggatagatc tgctggtgaa | 660 |
| gctgataacg ctgttatttt gttgttgcaa agatacccag ctatgccagt tgttgaattc | 720 |
| ttgaatgatg aattggctgg tcacaccaga atgttgcata gagttatggc tgaagaaaga | 780 |
| tttccagctc catggggtcc attgattgaa gctatggctg ctattagagt tcagtactac | 840 |
| agaacttcta cctccagata tagatccgat gctgtaagag gtggacaaag agcaccagct | 900 |
| taa | 903 |

SEQ ID NO: 132

| | |
|---|---|
| MIQTERAVQQ VLEWGRSLTG FADEHAVEAV RGGQYILQRI HPSLRGTSAR TGRDPQDETL | 60 |
| IVTFYRELAL LFWLDDCNDL GLISPEQLAA VEQALGQGVP CALPGFEGCA VLRASLATLA | 120 |
| YDRRDYAQLL DDTRCYSAAL RAGHAQAVAA ERWSYAEYLH NGIDSIAYAN VFCCLSLLWG | 180 |
| LDMATLRARP AFRQVLRLIS AIGRLQNDLH GCDKDRSAGE ADNAVILLLQ RYPAMPVVEF | 240 |
| LNDELAGHTR MLHRVMAEER FPAPWGPLIE AMAAIRVQYY RTSTSRYRSD AVRGGQRAPA | 300 |

SEQ ID NO: 133

| | |
|---|---|
| atggctggtg attctcatga accatttgct actatagtcg agtctccttt gtcttacgtt | 60 |
| tcttccttgc catccaaaca tttcagagtt caattattgg aggccttgaa catctggtat | 120 |
| gaattgccac aaaacgaggt ttccaagatc ggtgatatct tgcagttgtt gcataactcc | 180 |
| tcattgatct tggatgactt ccaagataga tccccattga gaagaggtag accagctgct | 240 |
| catgctttgt ttggtgaagc tcaagctatt aactcttcct cttacggttt cattaaggct | 300 |
| gttgctttgg ctcaagaatc cttcgatttg gaatctacta aggctgttac taccgctatg | 360 |
| ttgagatctt ttgaaggtca agctgctgaa ttgcattgga ctcatacaaa aacttgccca | 420 |
| tccgttcaag aatacttgga aatggttaac ttctcctcct tgttgcattt ggctccacaa | 480 |
| ttgatgcaag ctaaaagagg ttctgctact ccagttgatc aaaggtctat ggtttccttg | 540 |
| atgagattgc taggtcaatt ctaccaaatc agggacgact atatgaactt gacttctgct | 600 |
| cattacgaaa aggataaggg tttctgcgaa gatttggacg aaggtaaata ttccttgcca | 660 |
| ttgattcatg ctttggccgt taagccaaga tctgttttgt tggcttctgc tttggctgct | 720 |
| tctggtgctc caggtggttt atctagacaa caaaaagtct gcatcttgga agaattggaa | 780 |
| aaggctagat ctttggcttg gacaaaagct actttgtgcg aattgcaagt tgccatgtct | 840 |
| gaagaaattg cccaattgga agatagattc ggtagaccaa acgagttgtt gcaaaccttg | 900 |
| atttctaagg ttgccattaa gtaa | 924 |

SEQ ID NO: 134

| | |
|---|---|
| MAGDSHEPFA TIVESPLSYV SSLPSKHFRV QLLEALNIWY ELPQNEVSKI GDILQLLHNS | 60 |
| SLILDDFQDR SPLRRGRPAA HALFGEAQAI NSSSYGFIKA VALAQESFDL ESTKAVTTAM | 120 |
| LRSFEGQAAE LHWTHTKTCP SVQEYLEMVN FSSLLHLAPQ LMQAKRGSAT PVDQRSMVSL | 180 |
| MRLLGQFYQI RDDYMNLTSA HYEKDKGFCE DLDEGKYSLP LIHALAVKPR SVLLASALAA | 240 |
| SGAPGGLSRQ QKVCILEELE KARSLAWTKA TLCELQVAMS EEIAQLEDRF GRPNELLQTL | 300 |
| ISKVAIK | 307 |

SEQ ID NO: 135

| | |
|---|---|
| atggctgcta gattgttaag agttgcctct gctgcactag gtgatactgc cggaagatgg | 60 |
| agactattag taagaccaag agctggcgcc ggtggattaa ggggctcaag aggtcctggt | 120 |
| ctaggaggcg gtgccgtcgc tacaagaacc ctttccgtga gtggaagggc acaaagctct | 180 |
| tcagaggaca aaattactgt tcactttatc aatagagatg gtgagacatt gaccactaag | 240 |
| ggcaaaatcg gtgactcctt attggatgta gtcgtgcaga acaacttaga cattgatgga | 300 |
| ttcggtgctt gtgaaggcac actagcctgc agtacctgtc accttatatt tgagcaacat | 360 |
| atcttcgaaa agttggaagc aattactgat gaggaaaacg acatgttaga tctagcttat | 420 |
| ggtttgacag acaggagcag attaggatgc cagatatgtc ttaccaaagc catggataat | 480 |
| atgactgtta gagtaccaga tgcagtctct gacgctaggg aatcaatcga tatgggtatg | 540 |
| aactccagta agattgagta a | 561 |

SEQ ID NO: 136

| | |
|---|---|
| MAARLLRVAS AALGDTAGRW RLLVRPRAGA GGLRGSRGPG LGGGAVATRT LSVSGRAQSS | 60 |
| SEDKITVHFI NRDGETLITK GKIGDSLLDV VVQNNLDIDG FGACEGTLAC STCHLIFEQH | 120 |
| IFEKLEAITD EENDMLDLAY GLTDRSRLGC QICLTKAMDN MTVRVPDAVS DARESIDMGM | 180 |
| NSSKIE | 186 |

SEQ ID NO: 137

| | |
|---|---|
| atgcttttga acacctttac ccaaactgcc agaagtgaca ggtgtgcttt ctatggaaat | 60 |
| gtcgaagtgg gcagagatgt tacagtacaa gaattaaggg tctacaggtt gaccgcagtt | 120 |
| gttctaagct atggtgccga agatcaccag gcacttgata ttccaggtga agagttgcca | 180 |
| ggagtttttt ctgcaagagc tttcgtaggc tggtacaacg gtttgccaga aaatagagaa | 240 |
| ttagcccctg acctatcatg cgatactgca gtcatattgg gacaaggtaa cgtggctttg | 300 |
| gacgttgcca ggatactttt gaccccacct gaccacttag agaaaactga tattaccgaa | 360 |
| gcagctctag gcgcccttag acagtccaga gtaaagacag tctggatagt tggtaggaga | 420 |
| ggaccattgc aagtggcctt tactatcaaa gagcttagag agatgattca acttcctggc | 480 |
| accaggccta tgttggaccc agctgatttc ttaggccttc aggatagaat tagggaagcc | 540 |
| gcaagaccta gaaagaggtt gatggagtta ctattgagaa cagctactga aaaaccaggt | 600 |
| gttgaagagg ccgcaagaag ggctagtgct agcagagctt ggggattaag gtttttcaga | 660 |
| agccctcaac aagtacttag gcttccagac ggtagggcaa gaagatcagc ttggcagtcc | 720 |
| cctgaattgg aaggcatagg agaggcccat ccaggtagcg cacactgggg ctgtggtgga | 780 |
| cctccatgcg gtttagtact ttcttcaatc ggctataagt ctaggcctat tgatccaagc | 840 |
| gtgccttttg acccaaaatt gggtgttgta ccaaatatgg aaggaagagt cgttgatgtg | 900 |
| cctggtttat actgttccgg ctgggttaag agaggaccaa caggtgtaat aaccactaca | 960 |
| atgactgata gttttctaac cggtcaaatt ttgctacagg accttaaagc tggccatttg | 1020 |
| ccttccggtc caaggcctgg ctcagccttc attaaggcac tattagattc taggggtgtc | 1080 |
| tggccagttt cctttagtga ctgggaaaaa ttggatgctg aggaagtgag cagaggccaa | 1140 |
| gcatctggaa agcctagaga aaaacttcta gatcctcaag agatgctaag attgttaggt | 1200 |
| cactga | 1206 |

SEQ ID NO: 138

| | |
|---|---|
| MLLNTFTQTA RSDRCAFYGN VEVGRDVTVQ ELRVYRLTAV VLSYGAEDHQ ALDIPGEELP | 60 |
| GVFSARAFVG WYNGLPENRE LAPDLSCDTA VILGQGNVAL DVARILLTPP DHLEKTDITE | 120 |
| AALGALRQSR VKTVWIVGRR GPLQVAFTIK ELREMIQLPG TRPMLDPADF LGLQDRIREA | 180 |
| ARPRKRLMEL LLRTATEKPG VEEAARRASA SRAWGLRFFR SPQQVLRLPD GRARRSAWQS | 240 |
| PELEGIGEAH PGSAHWGCGG PPCGLVLSSI GYKSRPIDPS VPFDPKLGVV PNMEGRVVDV | 300 |
| PGLYCSGWVK RGPTGVITTT MTDSFLTGQI LLQDLKAGHL PSGPRPGSAF IKALLDSRGV | 360 |
| WPVSFSDWEK LDAEEVSRGQ ASGKPREKLL DPQEMLRLLG H | 401 |

SEQ ID NO: 139

| | |
|---|---|
| atggtggaca caaacttatt ggcttctgtt gccgtcgctc tagtcgtcgt tttcgttgct | 60 |
| tacaagtact ttaatggtgg gctggaagtc caatcatcta atgctggatc tagtacacct | 120 |
| tttggtaatg caaaggctga cgaagacgga gattccagga acttcgtggc tttgatggaa | 180 |
| aaaaataata agaacgttat tgttttctat ggttcccaaa caggaacggc cgaggatttg | 240 |
| gctagcaaat tggccaagga gttaagctca aagtatggtc taaggacaat gaccgccgat | 300 |
| cccgaaaatt ttgatttcga caaatttgat acctttccag agagtcatct ggctgttttt | 360 |
| atcacagcca gttacggaga tggcgaacct acagacaatg cacaggattt atattccttc | 420 |
| ttaggtaatt caccaagttt ctcacaggat ggtgaaaccc ttgagaacct taattttgca | 480 |
| gtgttcggtt taggtaatgt actatatgaa ttctacaaca aggccggcag agatatgcac | 540 |
| aagtttctaa ctgatttagg cggtcactca ataggtccat acggggaagg tgatgactca | 600 |
| aaagggatgt tagaggaaga ttacatggca tggaaagatg aatttctagc tgccctagtt | 660 |
| acgaaatggg gtttgaagga aagagaagct gtctacgagc cagccattag tgtgaaggat | 720 |
| attgaagagg atgctcaatc acatgacgtt tacttgggtg aaccaaacct aaagcactta | 780 |
| caagctagca aggcccgtga agtccccaaa gggccgtata atgctagcaa tccaatgtta | 840 |
| gccaaggtta cagcagctca ggagttgttt actaacactg atcgtcattg tattcatatg | 900 |
| gagtttgata ctaccggcgc gaggtatacc acgggcgatc acctggcttt ctggtgtcaa | 960 |
| aataacgaag aggaagttca gagattcgct aaggcattag gtataaccaa cccgcagcaa | 1020 |
| ccaattgcaa tatcagtgct tgacaagact tcaacagtaa gaattcccag tccaactacc | 1080 |
| tatgagacca ttataagaca ttttttagag atcaacggcc cagtgagccg tcaagttctt | 1140 |
| agtagcattg caccgttcgc cccgagcgag gaagtcaaga aagctacgca acagctaggc | 1200 |
| tctaacaagg aactgtttgc tagtcatgtt gccgcaaaaa agtttaacat agcaagattg | 1260 |
| ttgttgcatt tatcaggcgg ccaaccttgg aaaaacgtcc ccttttcatt catcattgaa | 1320 |
| accattcccc atctacaacc caggtactac tctatttcct catcatcagt ccaaagccct | 1380 |
| aatactatct ctattactgc tgtcgtggaa agacaaaagt tagccggtgt agatcatgaa | 1440 |
| ttgagaggtg tagccacgaa tcaaattttg gccttgtccg aagcattgat aggtagacct | 1500 |
| tcaagcacat acagactaca gcagccccat gattttacag gttcattaaa ttcacaagat | 1560 |
| attagagtac cagtacatat tagacatagc ttatttaagc tacctgccaa acccacagtt | 1620 |
| ccaataataa tggtcggacc aggtaccggc gtcgcgccat tcagaggttt tgtgcatgaa | 1680 |
| agggcagctc aaaaggctgc cggtaaggaa gttggaaaag ctctattgtt caccggatca | 1740 |
| agacatgcaa atgaggattt tctatacaga gacgaatgga aacaatttag tgattttttg | 1800 |
| gatttggaaa cagctttttc tagagattcc aatactaagg tttatgtgca acacaagctg | 1860 |
| aaagaaagag ccaaggacgt gtttgctttg cttaatgaag gcgcggtttt ctatgtctgc | 1920 |
| ggtgacgcgg gtggaatgtc acatgatgtg catagcgcct tgttggaaat tgtagctcaa | 1980 |
| gagggtaact tgtctagcga agatgcagat aaatttgtca ggaaaatgag atcaagaaat | 2040 |
| aagtaccaag aggatgtatg gtaa | 2064 |

SEQ ID NO: 140

| | |
|---|---|
| MVDTNLLASV AVALVVVFVA YKYFNGGLEV QSSNAGSSTP FGNAKADEDG DSRNFVALME | 60 |
| KNNKNVIVFY GSQTGTAEDL ASKLAKELSS KYGLRTMTAD PENFDFDKFD TFPESHLAVF | 120 |
| ITASYGDGEP TDNAQDLYSF LGNSPSFSQD GETLENLNFA VFGLGNVLYE FYNKAGRDMH | 180 |
| KFLTDLGGHS IGPYGEGDDS KGMLEEDYMA WKDEFLAALV TKWGLKEREA VYEPAISVKD | 240 |
| IEEDAQSHDV YLGEPNLKHL QASKAREVPK GPYNASNPML AKVTAAQELF TNTDRHCIHM | 300 |
| EFDTTGARYT TGDHLAFWCQ NNEEEVQRFA KALGITNPQQ PIAISVLDKT STVRIPSPIT | 360 |
| YETIIRHFLE INGPVSRQVL SSIAPFAPSE EVKKATQQLG SNKELFASHV AAKKFNIARL | 420 |
| LLHLSGGQPW KNVPFSFIIE TIPHLQPRYY SISSSSVQSP NTISITAVVE RQKLAGVDHE | 480 |
| LRGVATNQIL ALSEALIGRP SSTYRLQQPH DFTGSLNSQD IRVPVHIRHS LFKLPAKPTV | 540 |
| PIIMVGPGTG VAPFRGFVHE RAAQKAAGKE VGKALLFTGS RHANEDFLYR DEWKQFSDFL | 600 |
| DLETAFSRDS NTKVYVQHKL KERAKDVFAL LNEGAVFYVC GDAGGMSHDV HSALLEIVAQ | 660 |
| EGNLSSEDAD KFVRKMRSRN KYQEDVW | 687 |

SEQ ID NO: 141

| | |
|---|---|
| atgtccatat tcaacatgat cacttcttac gctggcagtc aattactgcc attctatatt | 60 |
| gctatttttg tttttactct ggttccttgg gctatcaggt tttcttggct tgaattgagg | 120 |
| aaggggtctg tagtcccctt agcaaatcca cccgatagtc tttttggaac aggtaagaca | 180 |
| cgtagatcct ttgtaaaatt atctagggaa atattagcta aggctagatc attgtttccg | 240 |
| aacgaaccct ttagattaat cactgactgg ggcgaggtat taatattacc tcctgatttt | 300 |
| gctgacgaaa tacgtaatga tccgaggcta tcattcagta aagctgctat gcaagataat | 360 |
| cacgccggta ttccagggtt tgagacagtc gctttggtgg gacgtgaaga ccaattaata | 420 |
| caaaaagtcg ccagaaagca attgactaag catcttagcg cagtaattga acctctgagt | 480 |
| agggaaagta ccctagctgt atctctaaat tttggagaaa cgacagaatg gagagccatt | 540 |
| aggcttaagc cagcaattct tgatattatt gctaggatct cctcacgtat ctatctagga | 600 |
| gatcaactat gcaggaatga ggcatggcta aagattacta agacttacac aacaaacttt | 660 |
| tacactgcct ctaccaatct tagaatgttc cccagaagta taagaccttt agctcactgg | 720 |
| ttcttgccag aatgtagaaa gcttcgtcaa gagaggaagg atgcaattgg tattataacg | 780 |
| ccactaatcg aaaggagaag agaattgcgt agagcagcta ttgcagctgg acagccttta | 840 |
| ccagtttttc acgacgcaat cgattggtcc gaacaagagg ctgaagctgc cggtacaggt | 900 |
| gcatcatttg accctgtgat atttcaatta acattgtctt tgttggctat tcatacaacc | 960 |
| tatgacttat tgcaacagac catgatagac ttgggtaggc accctgaata tatagaacct | 1020 |
| ctgagacaag aagttgtgca actgttgaga gaagaaggtt ggaagaaaac tactttattt | 1080 |
| aagatgaagt tacttgattc cgcaataaag gaaagtcaaa gaatgaaacc aggatccatt | 1140 |
| gtcacgatgc gtcgttacgt gaccgaggac atcacactat cctctggttt aacgctaaaa | 1200 |
| aaaggcacca gattgaatgt tgacaatcgt aggttggatg atcccaagat ctatgacaat | 1260 |
| cctgaagtct ataatcctta tcgtttttat gatatgagat ccgaagcagg taaagatcat | 1320 |
| ggcgcccagc tggttagtac aggctctaat cacatgggtt ttggccatgg gcaacattca | 1380 |
| tgtccgggta gattttttgc cgcaaatgag atcaaagtag ccctatgtca tattttagtg | 1440 |
| aaatatgact ggaaattatg cccagataca gaaaccaaac ctgacactcg tgggatgata | 1500 |
| gctaagtcta gcccagttac tgacatcctt attaagagaa gagaatcagt agagttagat | 1560 |
| ttagaggcga tttaa | 1575 |

SEQ ID NO: 142

| | |
|---|---|
| MSIFNMITSY AGSQLLPFYI AIFVFTLVPW AIRFSWLELR KGSVVPLANP PDSLFGTGKT | 60 |
| RRSFVKLSRE ILAKARSLFP NEPFRLITDW GEVLILPPDF ADEIRNDPRL SFSKAAMQDN | 120 |
| HAGIPGFETV ALVGREDQLI QKVARKQLTK HLSAVIEPLS RESTLAVSLN FGETTEWRAI | 180 |
| RLKPAILDII ARISSRIYLG DQLCRNEAWL KITKTYTINF YTASTNLRMF PRSIRPLAHW | 240 |
| FLPECRKLRQ ERKDAIGIIT PLIERRRELR RAAIAAGQPL PVFHDAIDWS EQEAEAAGTG | 300 |
| ASFDPVIFQL TLSLLAIHTT YDLLQQTMID LGRHPEYIEP LRQEVVQLLR EEGWKKTTLF | 360 |
| KMKLLDSAIK ESQRMKPGSI VIMRRYVTED ITLSSGLTLK KGTRLNVDNR RLDDPKIYDN | 420 |
| PEVYNPYRFY DMRSEAGKDH GAQLVSTGSN HMGFGHGQHS CPGRFFAANE IKVALCHILV | 480 |
| KYDWKLCPDT ETKPDTRGMI AKSSPVTDIL IKRRESVELD LEAI | 524 |

SEQ ID NO: 143

| | |
|---|---|
| atgaaatata caacctgtca gatgaacatc ttcccttccc tatggtcaat gaaaacgtcc | 60 |
| ttcagatggc ctagaacatc caaatggtct tcagtttcac tatatgacat gatgttgagg | 120 |
| actgtagccc tgctgtcagg tagagctttc gttggcttac cactatgtag agatgaggga | 180 |
| tggttgcagg caagtatagg ttatacagtc caatgcgttt caataagaga tcagcttttt | 240 |
| acttggagcc ccgtattgag accaattatc gggccattct tgccctcagt tagaagtgtg | 300 |
| aggagacact tgagatttgc tgcagaaatt atggctcctc ttatcagtca ggctttacaa | 360 |
| gatgaaaagc aacacagggc tgatacactt ttagcagatc agaccgaagg tcgtggcacg | 420 |
| tttatttctt ggttactgag acacctgcca gaagaattac gtactcctga gcaagtagga | 480 |
| ctggaccaga tgcttgtatc ttttgccgca attcacacta caacaatggc tctaaccaaa | 540 |
| gtcgtgtggg aattagttaa gagaccagaa tacatcgaac ccttgagaac tgaaatgcaa | 600 |
| gatgtcttcg ggcccgatgc ggtttcacca gacatttgca ttaataaaga ggccctatcc | 660 |
| aggttgcata aattggattc ttttattagg gaggttcaaa gatggtgtcc ttccactttt | 720 |
| gttactccta gccgtagagt gatgaagtcc atgacgctga gcaacggaat taaactgcaa | 780 |
| cgtggtacga gtattgcttt tcctgctcat gctatacata tgtcagaaga aacacctact | 840 |
| ttttcacctg acttttcttc tgacttcgaa aatccttccc ctagaatttt tgatgggttc | 900 |
| cgttatttaa acttgaggtc aatcaaggga caaggaagcc agcatcaagc ggctactacc | 960 |
| ggtcctgatt acttaatttt taaccatggt aaacatgctt gccctggtag attttttgct | 1020 |
| atttcagaaa taaaaatgat cttgatagag ttactagcta agtacgattt caggttggaa | 1080 |
| gacggaaaac cagggcctga actaatgaga gttggtactg agacaagatt ggatacaaag | 1140 |
| gcaggtttgg agatgagacg tagataa | 1167 |

SEQ ID NO: 144

| | |
|---|---|
| MKYTTCQMNI FPSLWSMKTS FRWPRTSKWS SVSLYDMMLR TVALLSGRAF VGLPLCRDEG | 60 |
| WLQASIGYTV QCVSIRDQLF TWSPVLRPII GPFLPSVRSV RRHLRFAAEI MAPLISQALQ | 120 |
| DEKQHRADTL LADQTEGRGT FISWLLRHLP EELRTPEQVG LDQMLVSFAA IHTTIMALTK | 180 |
| VVWELVKRPE YIEPLRTEMQ DVFGPDAVSP DICINKEALS RLHKLDSFIR EVQRWCPSTF | 240 |
| VTPSRRVMKS MTLSNGIKLQ RGTSIAFPAH AIHMSEETPT FSPDFSSDFE NPSPRIFDGF | 300 |
| RYLNLRSIKG QGSQHQAATT GPDYLIFNHG KHACPGRFFA ISEIKMILIE LLAKYDFRLE | 360 |
| DGKPGPELMR VGTETRLDTK AGLEMRRR | 388 |

SEQ ID NO: 145

| | |
|---|---|
| atggctaacc attccagttc atactaccat gaattttaca aagatcattc tcacacagtc | 60 |
| ttgacgctaa tgtctgaaaa acctgtgatt ttgccatcct taatacttgg aacctgtgcc | 120 |
| gtgttgttat gtatacaatg gctgaaaccg cagcctttaa tcatggtcaa cggtagaaag | 180 |
| tttggagaat tgtctaatgt aagagccaag cgtgatttta ccttcggtgc gagacaattg | 240 |
| ttagaaaagg gtctgaaaat gtcacctgac aaacccttca gaataatggg tgatgttggt | 300 |
| gagttgcata tcttgccacc aaaatatgct tatgaagtac gtaacaatga aaaactatct | 360 |
| ttcaccatgg cagccttcaa atggttttac gcacacttgc ctggtttcga aggtttcaga | 420 |
| gaaggtacca atgaatcaca tattatgaag ttggtcgcaa ggcatcaact aacacatcaa | 480 |
| ctgacactag ttacaggtgc agtctccgaa gagtgtgctc ttgttttaaa ggatgtttac | 540 |
| accgatagtc ccgagtggca tgacatcacc gccaaggacg caaatatgaa actgatggct | 600 |
| aggataacta gtagagtttt ccttggtaaa gaaatgtgca gaaaccctca atggttacgt | 660 |
| atcacatcta catatgccgt gattgcattc agagcagtag aggaactaag attatggcca | 720 |
| tcatggttga gaccagttgt tcaatggttt atgccacact gtacgcagtc tagagccctt | 780 |
| gtgcaagaag caagggactt aattaatccg ttgttggaaa ggagaaggga agaaaaagcg | 840 |
| gaggctgaaa ggacgggtga gaaggtaact tacaatgacg ctgtggaatg gttggacgat | 900 |
| ttggccaggg aaaagggagt gggttatgat cctgcctgcg ctcaattaag cctaagtgtt | 960 |
| gccgccttac attcaactac tgacttcttc actcaagtta tgtttgatat tgctcaaaat | 1020 |
| cctgagttga tagaaccgtt aagagaagag atcatagcag tcttgggcaa acagggatgg | 1080 |
| tccaagaaca gtttgtataa tcttaaactg atggattctg tgttgaaaga gtcacaacgt | 1140 |
| ctaaagccaa tagccatcgc tagcatgagg agatttacta cacacaacgt taaattgtcc | 1200 |
| gatggcgtca tattacccaa gaacaagtta acgttagtta gcgcacatca gcactgggat | 1260 |
| ccagagtact acaaagaccc attaaaattt gatggctata gattctttaa catgagacgt | 1320 |
| gagcccggca aagaatcaaa agcacaacta gtctctgcga ccccagacca tatggggttc | 1380 |
| ggttatggcc tacatgcctg tcctggcagg ttttttgctt ctgaagaaat caaaatcgca | 1440 |
| ctgtcacaca tcttactgaa gtatgatttt aagcccgttg aaggtagttc catggagcca | 1500 |
| agaaagtatg gtttgaacat gaacgcaaac cctactgcga aactgagcgt tcgtagaaga | 1560 |
| aaggaagaga ttgctattta a | 1581 |

SEQ ID NO: 146

| | |
|---|---|
| MANHSSSYYH EFYKDHSHTV LTLMSEKPVI LPSLILGTCA VLLCIQWLKP QPLIMVNGRK | 60 |
| FGELSNVRAK RDFTFGARQL LEKGLKMSPD KPFRIMGDVG ELHILPPKYA YEVRNNEKLS | 120 |
| FTMAAFKWFY AHLPGFEGFR EGTNESHIMK LVARHQLTHQ LTLVTGAVSE ECALVLKDVY | 180 |
| TDSPEWHDIT AKDANMKLMA RITSRVFLGK EMCRNPQWLR ITSTYAVIAF RAVEELRLWP | 240 |
| SWLRPVVQWF MPHCTQSRAL VQEARDLINP LLERRREEKA EAERTGEKVT YNDAVEWLDD | 300 |
| LAREKGVGYD PACAQLSLSV AALHSTTDFF TQVMFDIAQN PELIEPLREE IIAVLGKQGW | 360 |
| SKNSLYNLKL MDSVLKESQR LKPIAIASMR RFTTHNVKLS DGVILPKNKL TLVSAHQHWD | 420 |
| PEYYKDPLKF DGYRFFNMRR EPGKESKAQL VSATPDHMGF GYGLHACPGR FFASEEIKIA | 480 |
| LSHILLKYDF KPVEGSSMEP RKYGLNMNAN PTAKLSVRRR KEEIAI | 526 |

SEQ ID NO: 147

| | |
|---|---|
| atgtctaagg ttgtgtacgt ttctcatgat ggtacccgta gggaactaga tgttgctgat | 60 |
| ggcgtttcat taatgcaagc tgcagtttca aatggtatat atgatattgt cggcgattgt | 120 |
| ggtggaagtg cttcctgtgc gacgtgtcat gtctatgtaa acgaagcttt tacggataag | 180 |
| gtcccagctg ctaatgaaag agagataggt atgttggaat gtgttacagc ggagttaaaa | 240 |
| ccaaattcca gactatgctg ccaaattatt atgacccctg aactggatgg aatagtagtt | 300 |
| gatgttcctg acagacaatg gtaa | 324 |

SEQ ID NO: 148

| | |
|---|---|
| MSKVVYVSHD GTRRELDVAD GVSLMQAAVS NGIYDIVGDC GGSASCATCH VYVNEAFTDK | 60 |
| VPAANEREIG MLECVTAELK PNSRLCCQII MTPELDGIVV DVPDRQW | 107 |

SEQ ID NO: 149

| | |
|---|---|
| atgaacgcga acgataatgt cgtaattgtg ggtactggat tagccggcgt agaggtggct | 60 |
| tttggattaa gagcgtctgg atgggaaggt aatatcaggc tggttgggga tgccactgtt | 120 |
| ataccacatc acttgcctcc tctgtctaaa gcttatttgg ccggcaaagc tactgctgag | 180 |
| tccttatact taaggactcc ggatgcctat gcagcccaaa atatccaatt gttgggtgga | 240 |
| acgcaggtga cggccatcaa cagagatcgt caacaagtta ttttgagtga tggaagagca | 300 |
| ttggactacg atagactggt tttggctaca ggtggtagac ctaggcctct accagttgca | 360 |
| agtggtgccg ttggaaaagc caacaatttc agatatttaa ggactctaga agacgctgaa | 420 |
| tgcattagga ggcagttgat agcagacaat agactagttg tgattggggg cgggtacatc | 480 |
| ggcttagaag tagcagcgac agcaataaaa gcgaacatgc acgttacact attagatacg | 540 |
| gccgcaagag tactagagag ggtaaccgca cctccagtgt ctgcatttta tgaacatcta | 600 |
| catagagagg cgggtgttga catcaggact ggaactcagg tgtgcggttt cgaaatgtcc | 660 |
| acagatcaac aaaaggtcac cgcggttttg tgtgaagatg ggacaagatt gccagcagat | 720 |
| ttggtcattg ccgggatcgg tctaatccct aattgtgaac tggcctctgc cgcaggcctg | 780 |
| caagttgata atggtatcgt tattaacgaa catatgcaaa ctagcgaccc gttaataatg | 840 |
| gcggtcggag attgtgctcg ttttcatagc cagctatacg accgttgggt tagaatagag | 900 |
| tcagttccta acgcattgga acaagccagg aaaatcgctg ccatactttg tggtaaagta | 960 |
| ccaagagatg aggcagctcc atggttctgg agcgatcaat acgaaatcgg tttgaaaatg | 1020 |
| gttggattga gcgagggcta cgacagaatt atcgttagag gtagcttggc ccaaccagat | 1080 |
| ttttcagttt tttacttaca aggtgataga gttctagcag tcgatactgt caacagaccg | 1140 |
| gtagagttca accaaagcaa gcaaatcatt actgatagac tacctgtcga accaaacctt | 1200 |
| cttggagatg aatccgtgcc attgaaagaa atcattgccg ccgcgaaggc cgaactttcc | 1260 |
| agtgcttga | 1269 |

SEQ ID NO: 150

| | |
|---|---|
| MNANDNVVIV GTGLAGVEVA FGLRASGWEG NIRLVGDATV IPHHLPPLSK AYLAGKATAE | 60 |
| SLYLRTPDAY AAQNIQLLGG TQVTAINRDR QQVILSDGRA LDYDRLVLAT GGRPRPLPVA | 120 |
| SGAVGKANNF RYLRTLEDAE CIRRQLIADN RLVVIGGGYI GLEVAATAIK ANMHVILLDT | 180 |
| AARVLERVTA PPVSAFYEHL HREAGVDIRT GTQVCGFEMS TDQQKVTAVL CEDGTRLPAD | 240 |
| LVIAGIGLIP NCELASAAGL QVDNGIVINE HMQTSDPLIM AVGDCARFHS QLYDRWVRIE | 300 |
| SVPNALEQAR KIAAILCGKV PRDEAAPWFW SDQYEIGLKM VGLSEGYDRI IVRGSLAQPD | 360 |
| FSVFYLQGDR VLAVDTVNRP VEFNQSKQII TDRLPVEPNL LGDESVPLKE IIAAAKAELS | 420 |
| SA | 422 |

SEQ ID NO: 151

| | |
|---|---|
| atggctaaca ctggtattcc aaccgttgat gtttctttgt tcttgtccga aggtgaaaac | 60 |
| gaagctaaga agcaagctat tcaaaccatt accgaagcct gttcttctta cggttttttc | 120 |
| caaatcgtta accacggtat cccaatcgaa tttttgaaag aagccttgca gttgtccaag | 180 |
| acattttttc attatccaga cgaaatcaag ttgcaatact ctccaaaacc aggtgctcca | 240 |
| ttattggctg gttttaacaa gcaaaagacc aactgcgttg acaagaacga atacgttttg | 300 |
| gtttttccac caggctctaa gtttaacatc tatccacaag aaccaccaca attcaaagaa | 360 |
| accttggaag agatgttctt gaagttgtct gatgtctcct tggtcatcga atccattttg | 420 |
| aatgtttgtt tgggtttgcc accaggtttc ttgaagcaat tcaacaatga tagatcctgg | 480 |
| gacttcatga ccaacttgta ttattaccca gctgctgatg ttggtgaaaa cggtttgatt | 540 |
| catcatgaag atgctaactg catcaccttg gttattcaag atgatgctgg tggtttacaa | 600 |
| gtccaaaaag attctgaatg gattccagtt actccagttg aaggtgctat cgttgttaac | 660 |
| gttggtgata tcatccaagt cttgtccaac aagaagttca agtctgctac tcacagagtt | 720 |
| gttagacaga agggtaaaga aagatactcc ttcgctttct tcagatcatt gcatggtgat | 780 |
| aagtgggttg aaccattgcc agaattcacc aaagaaattg gtgaaaagcc aaagtacaag | 840 |
| ggcttcgaat tcaatgaata cttggccttg agattgaaga acaagactca tccaccatct | 900 |
| agagttgaag atgagatttc catcaagcac tacgagatca actga | 945 |

SEQ ID NO: 152

| | |
|---|---|
| MANTGIPTVD VSLFLSEGEN EAKKQAIQTI TEACSSYGFF QIVNHGIPIE FLKEALQLSK | 60 |
| TFFHYPDEIK LQYSPKPGAP LLAGFNKQKT NCVDKNEYVL VFPPGSKFNI YPQEPPQFKE | 120 |
| TLEEMFLKLS DVSLVIESIL NVCLGLPPGF LKQFNNDRSW DFMTNLYYYP AADVGENGLI | 180 |
| HHEDANCITL VIQDDAGGLQ VQKDSEWIPV TPVEGAIVVN VGDIIQVLSN KKEKSATHRV | 240 |
| VRQKGKERYS FAFFRSLHGD KWVEPLPEFT KEIGEKPKYK GFEFNEYLAL RLKNKTHPPS | 300 |
| RVEDEISIKH YEIN | 314 |

SEQ ID NO: 153

| | |
|---|---|
| atgtcctcta gatctacccc aagaaaagaa cctatttgcg cttctggtat tttcccatcc | 60 |
| gttgataatc aagctttgga agttccacca ggtattcaaa agttgaccta ccaatctttg | 120 |
| acctcctcta cctctttcag attattgcaa gttttgtccg atggtggtag agatattttg | 180 |
| agatgcaaga tgttcgatgc tgatttggct gctagagaac caccaagata tattgctttg | 240 |
| tcttacacct ggcacgaaga atctttgcca aaaactttta gaccagtctt gatcaacgac | 300 |
| aagtacttga acgtttcttt gaacttgtgg aacttcttgc aaaactacag agaaacctcc | 360 |
| ggtgaaagaa ttatctggat tgatcaaatc tgcatcaatc aagaagataa ggacgaatgc | 420 |
| gttcaacaaa ttggtcaaat gtgcaagatc taccaatgcg cttctatgga tttgttctgg | 480 |
| attggtgaac caggtgaaaa tgctgaagct gttttggatt tgttgtcctc cttgaacaga | 540 |
| ttggaaacct acttgttgga atccggttct tctagaccag gtatttctgc tttgttgaac | 600 |
| ccaattttca tgagagctgt tggtttgcca gaacatgata atccaatttg gggttccttg | 660 |
| atgcaattca tttctagaac tgctttccaa agagcctgga tcattcaaga agttgctgtt | 720 |
| tctagaacca ccgctatttt ttgtggtttg ttgatgttgc cattcgatgt tgttggtaga | 780 |
| gctgctactt ttttggttga atcctcttgg attaaggttt tccacgaaat gtacaacgtt | 840 |
| tctggtgctg ctggttttat tactggtatg atgaactgca gagtcagaca tcaagaaggt | 900 |
| gaacatcaat ctttggactt gttgttggct tctaccagaa gattcaaagc tacaaagcca | 960 |
| gttgataaga tcttcgcctt gattaacttg gctgaatccg gtagaaaaga agctttgcca | 1020 |
| ccagctttaa gaccagatta cagaaaatct atcgtcggtg ttttcagaga tgtcaccttg | 1080 |
| tacttgatta gacaaggttc cttggatgtt ttgtccggtg ttgaagatgt taagttcaga | 1140 |
| caaatccacg aattgccatc ttggattcca gattactctg ttcatcaagt tgcctccatt | 1200 |
| ttgtgtatgc caccaagacc aggttggttg acattatatg ctgctgctgt tggtagagat | 1260 |
| gtttccgttc aaaattctcc agctgatcca aacattttga ccttgtctgc ttacaaggtt | 1320 |
| gacaccattt ctaagattgg ttccattgcc gaagaatcca tctacttgac tttggaaaaa | 1380 |
| tgggcctcta tggttgattt ttctgctgct tatccaactg ttaacggtaa cacttgtcca | 1440 |
| atgattgatg ctttttggag aaccttgatt ggtaacattg gtttgggtac ttctcaatac | 1500 |
| ccagtttctg aagattgggc tcattctttt gctgttttcg ctttacaagc cagagaagaa | 1560 |
| ttgcaacatc acttctcttc atcctctgat actgaaagag ctgctttgga atctccaata | 1620 |
| gttactccag gtatcgactc cattttgaga ttggttaagg atcattacca cggtaacaac | 1680 |
| gattctgatc aagatggtgg tttgtacgaa tctaccatgc atcatgtttc ttggtacaga | 1740 |
| agattattct tgaccaacgg tggttacttt ggtttggctc atccatcttc tcaaccaggt | 1800 |
| gatgaagttg ttttgttgtc tggtggtaga gttccattcg ttgttagaag agtttctgcc | 1860 |
| gaaagaagag aatgctattc tatcgttggt gaaacctacg ttcatggtat tatggacggt | 1920 |
| gaattattgg atgctactga cggtaaatgg gaagacttgc aattcaagtg a | 1971 |

SEQ ID NO: 154

| | |
|---|---|
| MSSRSTPRKE PICASGIFPS VDNQALEVPP GIQKLTYQSL TSSTSFRLLQ VLSDGGRDIL | 60 |
| RCKMFDADLA AREPPRYIAL SYTWHEESLP KTFRPVLIND KYLNVSLNLW NFLQNYRETS | 120 |
| GERIIWIDQI CINQEDKDEC VQQIGQMCKI YQCASMDLFW IGEPGENAEA VLDLLSSLNR | 180 |
| LETYLLESGS SRPGISALLN PIFMRAVGLP EHDNPIWGSL MQFISRTAFQ RAWIIQEVAV | 240 |
| SRTTAIFCGL LMLPFDVVGR AATFLVESSW IKVFHEMYNV SGAAGFITGM MNCRVRHQEG | 300 |
| EHQSLDLLLA STRRFKATKP VDKIFALINL AESGRKEALP PALRPDYRKS IVGVERDVIL | 360 |
| YLIRQGSLDV LSGVEDVKFR QIHELPSWIP DYSVHQVASI LCMPPRPGWL TLYAAAVGRD | 420 |
| VSVQNSPADP NILTLSAYKV DTISKIGSIA EESIYLTLEK WASMVDFSAA YPTVNGNTCP | 480 |
| MIDAFWRTLI GNIGLGTSQY PVSEDWAHSF AVFALQAREE LQHHFSSSSD TERAALESPI | 540 |
| VTPGIDSILR LVKDHYHGNN DSDQDGGLYE STMHHVSWYR RLFLTNGGYF GLAHPSSQPG | 600 |
| DEVVLLSGGR VPFVVRRVSA ERRECYSIVG ETYVHGIMDG ELLDATDGKW EDLQFK | 656 |

SEQ ID NO: 155

| | |
|---|---|
| atggcagata gtttggccgt tagacatgca gctgctttaa aattaatcga agatttaacg | 60 |
| tcttcattga atgatgtaga acctttagga gatattagca gagcgcaagc ggattatgat | 120 |
| gctgccgaag aaagacatag aagggaacaa gacccggcta ggaaaagggc attgtgcagg | 180 |
| gaactagtaa ggtacggcga tagactggag gaaattgaga agcaacataa ggaagctgaa | 240 |
| gccaagtgta aagaacaact agatctattt gacacaagac tagcgaaaga gggttaccgt | 300 |
| aaactagcca caagggcgtc ctctataact ggtactaacc aaactacaca ccaatcatcc | 360 |
| aatacttctg gaaacttaat tcagacacct gatccgaact acggacaact ttcaggcttt | 420 |
| acaaacgaca gagctactca tgaaaacacc gaatcaccag gaacgttgcc tcaatcttcc | 480 |
| actattagga acacaataga accgaggcta actcccagta gaacaaattc agctgctcca | 540 |
| tccagaggta tttccacgga tatcgatcaa caagtcagaa tagaacctac agtccaaaca | 600 |
| gacaggtcta atcaaaggcg tgacaacccc tctagttcta gaccagccaa gagacagaga | 660 |
| caaggcgcat ctagtgaaac agttacagaa aggacaataa ccttcgatga ggtatatcag | 720 |
| gggggaaagg ctaggtggaa atacaggatc accaaggtgc atggattata ttacgtattc | 780 |
| ggctgtgaga agcatgaaaa acattttggt aaagaaaatc cattacaatc agcaatgtcc | 840 |
| catttaaagg gtaaaggcca ttcttgtaag agacctaatg ctactcaagc tttacgtagt | 900 |
| ctgggaatac aagttttacc atgtacggat agagatcttg agctaaacaa caaagccgtt | 960 |
| gacaggtacc tggcagaaca agaagaaaag aataaaagaa gaaaggcgtc tgtaaaagat | 1020 |
| ttaagtcaag cacctcaaac tggtgaaatt tatatggcat ggttcggaga tgatgataaa | 1080 |
| ggctactggc tacacgcctt tctggtcata ccattctttc ctaggccagg cgacggcatg | 1140 |
| gacgttcaaa ctgtaacagg ctccaattta aacgatgata ttccagcctg ctataggttc | 1200 |
| gatgaaacta ctgatgggta taactggact gaggactaca aagaatatgg caaatacgca | 1260 |
| aataatagag tttacccaat tatgtgtctt gtgggtcaga tccctcataa agtcgattgg | 1320 |
| ttacctgtct gccatttcag aaaacttaat cttgaagatg aagacctaga ggacaaagat | 1380 |
| gtcattaaag cgtttatgcg taaaaatacc accgggaata caggttacgg caacgaggtt | 1440 |
| gatgatgaat cagaagatct atatggtgat tcctttgcag gtgatgatga tgtgcctaca | 1500 |
| agctctgaaa ggagacagtc tccgatagga aatagttctg aaaatatcaa tactgatcaa | 1560 |
| agcatacaag caggcgccac cgctgaaaat caagaaagcg gtaccttagg tccaaactta | 1620 |
| gcgactcaag aggttaaaga tgaattagcg acgatcggga gaggcgatgg tgctactagt | 1680 |
| gctgctgatc aaccggcaag agctaggcaa atgtctgtcc gtcgtcgttg gccttctgct | 1740 |
| agaaagggac caccggatat ggaaaccgtt agcgattcag agtaa | 1785 |

SEQ ID NO: 156

| | |
|---|---|
| MADSLAVRHA AALKLIEDLT SSLNDVEPLG DISRAQADYD AAEERHRREQ DPARKRALCR | 60 |
| ELVRYGDRLE EIEKQHKEAE AKCKEQLDLF DTRLAKEGYR KLATRASSIT GTNQTTHQSS | 120 |
| NTSGNLIQTP DPNYGQLSGF TNDRATHENT ESPGTLPQSS TIRNTIEPRL TPSRTNSAAP | 180 |
| SRGISTDIDQ QVRIEPTVQT DRSNQRRDNP SSSRPAKRQR QGASSETVTE RTITFDEVYQ | 240 |
| GGKARWKYRI TKVHGLYYVF GCEKHEKHFG KENPLQSAMS HLKGKGHSCK RPNATQALRS | 300 |
| LGIQVLPCTD RDLELNNKAV DRYLAEQEEK NKRRKASVKD LSQAPQTGEI YMAWFGDDDK | 360 |
| GYWLHAFLVI PFFPRPGDGM DVQTVTGSNL NDDIPACYRF DETTDGYNWT EDYKEYGKYA | 420 |
| NNRVYPIMCL VGQIPHKVDW LPVCHFRKLN LEDEDLEDKD VIKAFMRKNT TGNTGYGNEV | 480 |
| DDESEDLYGD SFAGDDDVPT SSERRQSPIG NSSENINTDQ SIQAGATAEN QESGTLGPNL | 540 |
| ATQEVKDELA TIGRGDGATS AADQPARARQ MSVRRRWPSA RKGPPDMETV SDSE | 594 |

SEQ ID NO: 157

| | |
|---|---|
| atggctcaat tggatacctt ggatttggtt gttttggccg ttttgttggt tggttctgtt | 60 |
| gcttatttta ccaagggtac ttattgggct gttgctaaag atccatatgc ttctactggt | 120 |
| ccagctatga atggtgctgc taaagctggt aaaaccagaa acattatcga aaagatggaa | 180 |
| gaaaccggta agaactgcgt tattttctac ggttctcaaa ctggtactgc tgaagattat | 240 |
| gcttccagat tggctaaaga aggttctcaa agattcggtt tgaaaaccat ggttgccgat | 300 |
| ttggaagaat acgactacga aaacttggac caattcccag aagataaggt tgcttttttc | 360 |
| gttttggcta cttacggtga aggtgaacct actgataatg ctgttgaatt ctaccaattc | 420 |
| ttcaccggtg atgatgttgc ttttgaatct gcttctgctg acgaaaaacc attgtctaag | 480 |
| ttgaagtacg ttgctttcgg tttgggtaac aacacttacg aacattacaa cgccatggtt | 540 |
| agacaagttg atgctgcttt tcaaaagttg ggtccacaaa gaattggttc tgctggtgaa | 600 |
| ggtgatgatg gtgctggtac tatggaagaa gattttttgg cttggaaaga acctatgtgg | 660 |
| gctgctttgt ctgaatctat ggacttggaa gaaagagaag ctgtttacga accagttttc | 720 |
| tgtgttaccg aaaacgaatc tttgtcccca gaagatgaaa ctgtttattt gggtgaacct | 780 |
| acccaatctc acttgcaagg tactccaaaa ggtccatatt ctgctcataa tccattcatt | 840 |
| gctccaatcg ctgaatccag agaattattc actgttaagg acagaaactg cttgcacatg | 900 |
| gaaatttcta ttgccggttc taacttgtct taccaaaccg gtgatcatat tgctgtttgg | 960 |
| ccaactaatg ctggtgctga agttgataga ttcttgcaag tttttggttt ggaaggtaag | 1020 |
| agagactccg ttattaacat caagggtatt gatgttaccg ccaaggttcc aattccaact | 1080 |
| ccaactactt atgatgctgc cgtcagatat tacatggaag tttgtgctcc agtctccaga | 1140 |
| caatttgttg ctactttggc tgcttttgct ccagatgaag aatctaaagc tgaaatcgtt | 1200 |
| agattgggtt cccacaagga ttactttcac gaaaaggtta ccaatcaatg cttcaatatg | 1260 |
| gctcaagcct tgcaatctat tacctctaaa ccattttctg ccgtcccatt ctctttgttg | 1320 |
| attgaaggta ttaccaagtt gcaacctaga tattactcca tctcctcctc ttcattggtt | 1380 |
| caaaaggata agatttccat caccgccgtt gttgaatctg ttagattgcc aggtgcttct | 1440 |
| catatggtta agggtgttac taccaattac ttgttggcct tgaagcaaaa gcaaaacggt | 1500 |
| gatccatctc cagatccaca tggtttgact tattctatta ctggtccaag aaacaagtac | 1560 |
| gatggtatcc atgttccagt tcatgttaga cactctaact tcaagttgcc atctgatcca | 1620 |
| tctagaccaa ttatcatggt tggtccaggt actggtgttg ctccttttag aggttttatt | 1680 |
| caagaaagag ctgctttggc tgctaagggt gaaaaagttg gtccaactgt tttgttcttc | 1740 |
| ggttgcagaa aatccgacga agatttcttg tacaaggacg aatggaaaac ctaccaagat | 1800 |
| caattgggtg acaacttgaa gattattacc gccttttcta gagaaggtcc acaaaaggtt | 1860 |
| tacgtccaac atagattgag agaacactcc gaattggttt ccgatttgtt gaaacaaaag | 1920 |
| gccacctttt acgtttgtgg tgatgctgct aatatggcca gagaagttaa tttggttttg | 1980 |
| ggtcaaatta tcgctgccca aagaggtttg ccagctgaaa aaggtgaaga aatggtcaaa | 2040 |
| cacatgagaa gaagaggtag ataccaagaa gatgtctggt cttaa | 2085 |

SEQ ID NO: 158

| | |
|---|---|
| MAQLDTLDLV VLAVLLVGSV AYFTKGTYWA VAKDPYASTG PAMNGAAKAG KTRNIIEKME | 60 |
| ETGKNCVIFY GSQTGTAEDY ASRLAKEGSQ RFGLKTMVAD LEEYDYENLD QFPEDKVAFF | 120 |
| VLATYGEGEP TDNAVEFYQF FTGDDVAFES ASADEKPLSK LKYVAFGLGN NTYEHYNAMV | 180 |
| RQVDAAFQKL GPQRIGSAGE GDDGAGTMEE DFLAWKEPMW AALSESMDLE EREAVYEPVF | 240 |
| CVTENESLSP EDETVYLGEP TQSHLQGTPK GPYSAHNPFI APIAESRELF TVKDRNCLHM | 300 |
| EISIAGSNLS YQTGDHIAVW PTNAGAEVDR FLQVFGLEGK RDSVINIKGI DVTAKVPIPT | 360 |
| PTTYDAAVRY YMEVCAPVSR QFVATLAAFA PDEESKAEIV RLGSHKDYFH EKVTNQCFNM | 420 |
| AQALQSITSK PFSAVPFSLL IEGITKLQPR YYSISSSSLV QKDKISITAV VESVRLPGAS | 480 |
| HMVKGVTTNY LLALKQKQNG DPSPDPHGLT YSITGPRNKY DGIHVPVHVR HSNFKLPSDP | 540 |
| SRPIIMVGPG TGVAPFRGFI QERAALAAKG EKVGPTVLFF GCRKSDEDFL YKDEWKTYQD | 600 |
| QLGDNLKIIT AFSREGPQKV YVQHRLREHS ELVSDLLKQK ATFYVCGDAA NMAREVNLVL | 660 |
| GQIIAAQRGL PAEKGEEMVK HMRRRGRYQE DVWS | 694 |

SEQ ID NO: 159

| | |
|---|---|
| atgtccgcca agaaagaatt caccatgcaa gatgttgctg aacacaatac ctcttccgat | 60 |
| atctacatgg ttgttcacga taaggtttac gattgcacca agttcttgga tgaacatcca | 120 |
| ggtggtgaag aagttatgtt ggacgttgct ggtcaagatg ctactgaagc ttttgaagat | 180 |
| gttggtcatt ctgatgaagc cagagaagtt ttggatggtt tgttggttgg tgaattgaaa | 240 |
| agattgccag gtgatgaagg tccaaagaga caaattgcta actccaatca aggttctggt | 300 |
| aaagctgatc cagctggttc ttctttgaat acttatgcta tcgttgttgc cgttggtttc | 360 |
| attgcttatg ttgcttacaa ctacttgcaa aagcaacaag aagctcaagg tcaagcttct | 420 |
| gcttaa | 426 |

SEQ ID NO: 160

| | |
|---|---|
| MSAKKEFTMQ DVAEHNTSSD IYMVVHDKVY DCTKFLDEHP GGEEVMLDVA GQDATEAFED | 60 |
| VGHSDEAREV LDGLLVGELK RLPGDEGPKR QIANSNQGSG KADPAGSSLN TYAIVVAVGF | 120 |
| IAYVAYNYLQ KQQEAQGQAS A | 141 |

SEQ ID NO: 161

| | |
|---|---|
| atggacttga agaatcaaac cttcaccttc catttcgata tggctaagga tactggtatt | 60 |
| ccaaccgttg atttgtctgt tttctctgct caaaacgaaa ccgaagctaa gaagaaggct | 120 |
| ttcgaaacta tctaccaagc ctgttcttct tacggtttct tccaaatcgt taaccatggt | 180 |
| gttccaatcg aattcttgga agaagctttg gaattgtcca gaacattctt ccattaccca | 240 |
| gatgacatca agttgaagta ctcttctaaa ccaggtgctc cattattggc tggttttaac | 300 |
| aagcaaaaga agaactgcgt tgacaagaac gaatacgttt tggtttttcc accaggctct | 360 |
| aactacaata tctatccaca agaaccacca caattcaaag aattattgga agaaatgttc | 420 |
| aagaagttgt ccaaggtctg cttgttgttg gaatctatcg ttaacgaatc tttgggtttg | 480 |
| ccaccagatt ttttgaagca gtacaacaac gatagatcct gggattttat gaccaccttg | 540 |
| tactactttt ctgctactga agaaggtgaa aacggtttga ctcatcatga agatggtaac | 600 |
| tgcattacct tggttttcca agatgatacc ggtggtttac aagttagaaa agatggtgaa | 660 |
| tggatcccag ttgttccagt tgaaggtgct atcgttgtta acattggtga tgttatccag | 720 |
| gtcttgtcca acaagaaatt caagtctgct acccacagag ttgttagaca aaagggtaaa | 780 |
| gaaagattct cctacgcctt cttccataac ttgcatggtg ataagtgggt tgaaccattg | 840 |
| ccacaattca ctgaagaaat tggtgaaaag ccaaagtaca agggtttcca attcaaggat | 900 |
| taccaagcct tgagattgaa gaacaaaact catccaccat ctagagttga ggacgaaatt | 960 |
| agaattaccc actacgagat cagctaa | 987 |

SEQ ID NO: 162

| | |
|---|---|
| MDLKNQTFTF HFDMAKDTGI PTVDLSVFSA QNETEAKKKA FETIYQACSS YGFFQIVNHG | 60 |
| VPIEFLEEAL ELSRTFFHYP DDIKLKYSSK PGAPLLAGFN KQKKNCVDKN EYVLVFPPGS | 120 |
| NYNIYPQEPP QFKELLEEMF KKLSKVCLLL ESIVNESLGL PPDFLKQYNN DRSWDFMTTL | 180 |
| YYFSATEEGE NGLTHHEDGN CITLVFQDDT GGLQVRKDGE WIPVVPVEGA IVVNIGDVIQ | 240 |
| VLSNKKFKSA THRVVRQKGK ERFSYAFFHN LHGDKWVEPL PQFTEEIGEK PKYKGFQFKD | 300 |
| YQALRLKNKT HPPSRVEDEI RITHYEIS | 328 |

SEQ ID NO: 163

| | |
|---|---|
| atggcctcca tcacccattt cttacaagat tttcaagcta ctccattcgc tactgctttt | 60 |
| gctgttggtg gtgtttcttt gttgatattc ttcttcttca tccgtggttt ccactctact | 120 |
| aagaaaaacg aatattacaa gttgccacca gttccagttg ttccaggttt gccagttgtt | 180 |
| ggtaatttgt tgcaattgaa agaaaagaag ccatacaaga ctttcttgag atgggctgaa | 240 |
| attcatggtc caatctactc tattagaact ggtgcttcta ccatggttgt tgttaactct | 300 |
| actcatgttg ccaaagaagc tatggttacc agattctctt caatctctac cagaaagttg | 360 |
| tccaaggctt tggaattatt gacctccaac aaatctatgg ttgccacctc tgattacaac | 420 |
| gaatttcaca agatggtcaa gaagtacatc ttggccgaat tattgggtgc taatgctcaa | 480 |
| aagagacaca gaattcatag agacaccttg atcgaaaacg tcttgaacaa attgcatgcc | 540 |
| cataccaaga attctccatt gcaagctgtt aacttcagaa agatcttcga atctgaatta | 600 |
| ttcggtttgg ctatgaagca agccttgggt tatgatgttg attccttgtt cgttgaagaa | 660 |
| ttgggtacta ccttgtccag agaagaaatc tacaacgttt tggtcagtga catgttgaag | 720 |
| ggtgctattg aagttgattg gagagacttt ttcccatact tgaaatggat cccaaacaag | 780 |
| tccttcgaaa tgaagattca aagattggcc tctagaagac aagccgttat gaactctatt | 840 |
| gtcaaagaac aaaagaagtc cattgcctct ggtaagggtg aaaactgtta cttgaattac | 900 |
| ttgttgtccg aagctaagac tttgaccgaa aagcaaattt ccattttggc ctgggaaacc | 960 |
| attattgaaa ctgctgatac aactgttgtt accactgaat gggctatgta cgaattggct | 1020 |
| aaaaacccaa agcaacaaga cagattatac aacgaaatcc aaaacgtctg cggtactgat | 1080 |
| aagattaccg aagaacattt gtccaagttg ccttacttgt ctgctgtttt tcacgaaacc | 1140 |
| ttgagaaagt attctccatc tccattggtt ccattgagat acgctcatga agatactcaa | 1200 |
| ttgggtggtt attatgttcc agccggtact gaaattgctg ttaatatcta cggttgcaac | 1260 |
| atggacaaga atcaatggga aactccagaa gaatggaagc cagaaagatt tttggacgaa | 1320 |
| aagtacgatc caatggacat gtacaagact atgtcttttg gttccggtaa aagagtttgc | 1380 |
| gctggttctt tacaagctag tttgattgct tgtacctcca tcggtagatt ggttcaagaa | 1440 |
| tttgaatgga gattgaaaga cggtgaagtt gaaaacgttg ataccttggg tttgactacc | 1500 |
| cataagttgt atccaatgca agctatcttg caacctagaa actga | 1545 |

SEQ ID NO: 164

| | |
|---|---|
| MASITHFLQD FQATPFATAF AVGGVSLLIF FFFIRGFHST KKNEYYKLPP VPVVPGLPVV | 60 |
| GNLLQLKEKK PYKTFLRWAE IHGPIYSIRT GASTMVVVNS THVAKEAMVT RFSSISTRKL | 120 |
| SKALELLTSN KSMVATSDYN EFHKMVKKYI LAELLGANAQ KRHRIHRDTL IENVLNKLHA | 180 |
| HTKNSPLQAV NFRKIFESEL FGLAMKQALG YDVDSLFVEE LGTTLSREEI YNVLVSDMLK | 240 |
| GAIEVDWRDF FPYLKWIPNK SFEMKIQRLA SRRQAVMNSI VKEQKKSIAS GKGENCYLNY | 300 |
| LLSEAKTLTE KQISILAWET IIETADTTVV TTEWAMYELA KNPKQQDRLY NEIQNVCGTD | 360 |
| KITEEHLSKL PYLSAVFHET LRKYSPSPLV PLRYAHEDTQ LGGYYVPAGT EIAVNIYGCN | 420 |
| MDKNQWETPE EWKPERFLDE KYDPMDMYKT MSEGSGKRVC AGSLQASLIA CTSIGRLVQE | 480 |
| FEWRLKDGEV ENVDTLGLTT HKLYPMQAIL QPRN | 514 |

SEQ ID NO: 165

| | |
|---|---|
| atgcaatcag attcagtcaa agtctctcca tttgatttgg tttccgctgc tatgaatggc | 60 |
| aaggcaatgg aaaagttgaa cgctagtgaa tctgaagatc caacaacatt gcctgcacta | 120 |
| aagatgctag ttgaaaatag agaattgttg acactgttca caacttcctt cgcagttctt | 180 |
| attgggtgtc ttgtatttct aatgtggaga cgttcatcct ctaaaaagct ggtacaagat | 240 |
| ccagttccac aagttatcgt tgtaaagaag aaagagaagg agtcagaggt tgatgacggg | 300 |
| aaaaagaaag tttctatttt ctacggcaca caaacaggaa ctgccgaagg ttttgctaaa | 360 |
| gcattagtcg aggaagcaaa agtgagatat gaaaagacct ctttcaaggt tatcgatcta | 420 |
| gatgactacg ctgcagatga tgatgaatat gaggaaaaac tgaaaaagga atccttagcc | 480 |
| ttcttcttct tggccacata cggtgatggt gaacctactg ataatgctgc taacttctac | 540 |
| aagtggttca cagaaggcga cgataaaggt gaatggctga aaaagttaca atacggagta | 600 |
| tttggtttag gtaacagaca atatgaacat ttcaacaaga tcgctattgt agttgatgat | 660 |
| aaacttactg aaatgggagc caaaagatta gtaccagtag gattagggga tgatgatcag | 720 |
| tgtatagaag atgacttcac cgcctggaag gaattggtat ggccagaatt ggatcaactt | 780 |
| ttaagggacg aagatgatac ttctgtgact accccataca ctgcagccgt attggagtac | 840 |
| agagtggttt accatgataa accagcagac tcatatgctg aagatcaaac ccatacaaac | 900 |
| ggtcatgttg ttcatgatgc acagcatcct tcaagatcta atgtggcttt caaaaaggaa | 960 |
| ctacacacct ctcaatcaga taggtcttgt actcacttag aattcgatat ttctcacaca | 1020 |
| ggactgtctt acgaaactgg cgatcacgtt ggcgtttatt ccgagaactt gtccgaagtt | 1080 |
| gtcgatgaag cactaaaact gttagggtta tcaccagaca catacttctc agtccatgct | 1140 |
| gataaggagg atgggacacc tatcggtggt gcttcactac caccaccttt tcctccttgc | 1200 |
| acattgagag acgctctaac cagatacgca gatgtcttat cctcacctaa aaaggtagct | 1260 |
| ttgctggcat tggctgctca tgctagtgat cctagtgaag ccgataggtt aaagttcctg | 1320 |
| gcttcaccag ccggaaaaga tgaatatgca caatggatcg tcgccaacca acgttctttg | 1380 |
| ctagaagtga tgcaaagttt tccatctgcc aagcctccat taggtgtgtt cttcgcagca | 1440 |
| gtagctccac gtttacaacc aagatactac tctatcagtt catctcctaa gatgtctcct | 1500 |
| aacagaatac atgttacatg tgctttggtg tacgagacta ctccagcagg cagaattcac | 1560 |
| agaggattgt gttcaacctg gatgaaaaat gctgtccctt taacagagtc acctgattgc | 1620 |
| tctcaagcat ccattttcgt tagaacatca aatttcagac ttccagtgga tccaaaagtt | 1680 |
| ccagtcatta tgataggacc aggcactggt cttgccccat tcaggggctt tcttcaagag | 1740 |
| agattggcct tgaaggaatc tggtacagaa ttgggttctt ctatcttttt ctttggttgc | 1800 |
| cgtaatagaa aagttgactt tatctacgag gacgagctta acaattttgt tgagacagga | 1860 |
| gcattgtcag aattgatcgt cgcattttca agagaaggga ctgccaaaga gtacgttcag | 1920 |
| cacaagatga gtcaaaaagc ctccgatata tggaaacttc taagtgaagg tgcctatctt | 1980 |
| tatgtctgtg gcgatgcaaa gggcatggcc aaggatgtcc atagaactct gcatacaatt | 2040 |
| gttcaggaac aagggagtct ggattcttcc aaggctgaat tgtacgtcaa aaacttacag | 2100 |
| atgtctggaa gatacttaag agatgtttgg taa | 2133 |

SEQ ID NO: 166

| | |
|---|---|
| MQSDSVKVSP FDLVSAAMNG KAMEKLNASE SEDPTTLPAL KMLVENRELL TLFTTSFAVL | 60 |
| IGCLVFLMWR RSSSKKLVQD PVPQVIVVKK KEKESEVDDG KKKVSIFYGT QTGTAEGFAK | 120 |
| ALVEEAKVRY EKTSFKVIDL DDYAADDDEY EEKLKKESLA FFFLATYGDG EPTDNAANFY | 180 |
| KWFTEGDDKG EWLKKLQYGV FGLGNRQYEH FNKIAIVVDD KLTEMGAKRL VPVGLGDDDQ | 240 |
| CIEDDFTAWK ELVWPELDQL LRDEDDTSVT TPYTAAVLEY RVVYHDKPAD SYAEDQTHTN | 300 |
| GHVVHDAQHP SRSNVAFKKE LHTSQSDRSC THLEFDISHT GLSYETGDHV GVYSENLSEV | 360 |
| VDEALKLLGL SPDTYFSVHA DKEDGTPIGG ASLPPPFPPC TLRDALTRYA DVLSSPKKVA | 420 |
| LLALAAHASD PSEADRLKFL ASPAGKDEYA QWIVANQRSL LEVMQSFPSA KPPLGVFFAA | 480 |
| VAPRLQPRYY SISSSPKMSP NRIHVTCALV YETTPAGRIH RGLCSTWMKN AVPLTESPDC | 540 |
| SQASIFVRTS NFRLPVDPKV PVIMIGPGTG LAPFRGFLQE RLALKESGTE LGSSIFFFGC | 600 |
| RNRKVDFIYE DELNNFVETG ALSELIVAFS REGTAKEYVQ HKMSQKASDI WKLLSEGAYL | 660 |
| YVCGDAKGMA KDVHRTLHTI VQEQGSLDSS KAELYVKNLQ MSGRYLRDVW | 710 |

SEQ ID NO: 167

| | |
|---|---|
| atgtcctcca actccgattt ggtcagaaga ttggaatctg ttttgggtgt ttctttcggt | 60 |
| ggttctgtta ctgattccgt tgttgttatt gctaccacct ctattgcttt ggttatcggt | 120 |
| gttttggttt tgttgtggag aagatcctct gacagatcta gagaagttaa gcaattggct | 180 |
| gttccaaagc cagttactat cgttgaagaa gaagatgaat tcgaagttgc ttctggtaag | 240 |
| accagagttt ctattttcta cggtactcaa actggtactg ctgaaggttt tgctaaggct | 300 |
| ttggctgaag aaatcaaagc cagatacgaa aaagctgccg ttaaggttat tgatttggat | 360 |
| gattacacag ccgaagatga caaatacggt gaaaagttga agaaagaaac tatggccttc | 420 |
| ttcatgttgg ctacttatgg tgatggtgaa cctactgata atgctgctag attttacaag | 480 |
| tggttcaccg aaggtactga tagaggtgtt tggttggaac atttgagata cggtgtattc | 540 |
| ggtttgggta acagacaata cgaacacttc aacaagattg ccaaggttgt tgatgatttg | 600 |
| ttggttgaac aaggtgccaa gagattggtt actgttggtt tgggtgatga tgatcaatgc | 660 |
| atcgaagatg atttctccgc ttggaaagaa gccttgtggc cagaattgga tcaattattg | 720 |
| caagatgata ccaacaccgt ttctactcca tacactgctg ttattccaga atacagagtt | 780 |
| gttatccacg atccatctgt tacctcttat gaagatccat actctaacat ggctaacggt | 840 |
| aatgcctctt acgatattca tcatccatgt agagctaacg ttgccgtcca aaaagaattg | 900 |
| cataagccag aatctgacag aagttgcatc catttggaat tcgatatttt cgctactggt | 960 |
| ttgacttacg aaaccggtga tcatgttggt gtttacgctg ataattgtga tgatactgta | 1020 |
| gaagaagccg ctaagttgtt gggtcaacca ttggatttgt tgttctccat tcataccgat | 1080 |
| aacaacgacg gtacttcttt gggttcttct ttgccaccac catttccagg tccatgtact | 1140 |
| ttgagaactg ctttggctag atatgccgat ttgttgaatc caccaaaaaa ggctgctttg | 1200 |
| attgctttag ctgctcatgc tgatgaacca tctgaagctg aaagattgaa gttcttgtca | 1260 |
| tctccacaag gtaaggacga atattctaaa tgggttgtcg gttcccaaag atccttggtt | 1320 |
| gaagttatgg ctgaatttcc atctgctaaa ccaccattgg gtgtattttt tgctgctgtt | 1380 |
| gttcctagat tgcaacctag atattactcc atctcttcca gtccaagatt tgctccacat | 1440 |
| agagttcatg ttacttgcgc tttggtttat ggtccaactc caactggtag aattcacaga | 1500 |
| ggtgtatgtt cattctggat gaagaatgtt gtcccattgg aaaagtctca aaactgttct | 1560 |
| tgggccccaa ttttcatcag acaatctaat ttcaagttgc cagccgatca ttctgttcca | 1620 |
| atagttatgg ttggtccagg tactggttta gctcctttta gaggtttctt acaagaaaga | 1680 |
| ttggccttga aagaagaagg tgctcaagtt ggtcctgctt tgttgttttt tggttgcaga | 1740 |
| aacagacaaa tggacttcat ctacgaagtc gaattgaaca actttgtcga acaaggtgct | 1800 |
| ttgtccgaat tgatcgttgc tttttcaaga gaaggtccat ccaaagaata cgtccaacat | 1860 |
| aagatggttg aaaaggcagc ttacatgtgg aacttgattt ctcaaggtgg ttacttctac | 1920 |
| gtttgtggtg atgctaaagg tatggctaga gatgttcata gaacattgca taccatcgtc | 1980 |
| caacaagaag aaaaggttga ttctaccaag gccgaatcca tcgttaagaa attgcaaatg | 2040 |
| gacggtagat acttgagaga tgtttggtga | 2070 |

SEQ ID NO: 168

| | |
|---|---|
| MSSNSDLVRR LESVLGVSFG GSVTDSVVVI ATTSIALVIG VLVLLWRRSS DRSREVKQLA | 60 |
| VPKPVTIVEE EDEFEVASGK TRVSIFYGTQ TGTAEGFAKA LAEEIKARYE KAAVKVIDLD | 120 |
| DYTAEDDKYG EKLKKETMAF FMLATYGDGE PTDNAARFYK WFTEGTDRGV WLEHLRYGVF | 180 |
| GLGNRQYEHF NKIAKVVDDL LVEQGAKRLV TVGLGDDDQC IEDDFSAWKE ALWPELDQLL | 240 |
| QDDTNTVSTP YTAVIPEYRV VIHDPSVTSY EDPYSNMANG NASYDIHHPC RANVAVQKEL | 300 |
| HKPESDRSCI HLEFDIFATG LTYETGDHVG VYADNCDDTV EEAAKLLGQP LDLLFSIHTD | 360 |
| NNDGTSLGSS LPPPFPGPCT LRTALARYAD LLNPPKKAAL IALAAHADEP SEAERLKFLS | 420 |
| SPQGKDEYSK WVVGSQRSLV EVMAEFPSAK PPLGVFFAAV VPRLQPRYYS ISSSPRFAPH | 480 |
| RVHVTCALVY GPTPTGRIHR GVCSFWMKNV VPLEKSQNCS WAPIFIRQSN FKLPADHSVP | 540 |
| IVMVGPGTGL APFRGFLQER LALKEEGAQV GPALLFFGCR NRQMDFIYEV ELNNFVEQGA | 600 |
| LSELIVAFSR EGPSKEYVQH KMVEKAAYMW NLISQGGYFY VCGDAKGMAR DVHRTLHTIV | 660 |
| QQEEKVDSTK AESIVKKLQM DGRYLRDVW | 689 |

SEQ ID NO: 169

| | |
|---|---|
| atggctacct tgttggaaca ttttcaagct atgccattcg ctattccaat tgctttggct | 60 |
| gctttgtctt ggttgttttt gttctacatc aaggtttctt tcttctccaa caaatccgct | 120 |
| caagctaaat tgccaccagt tccagttgtt ccaggtttgc cagttattgg taatttgttg | 180 |
| caattgaaag aaaagaagcc ataccaaacc ttcactagat gggctgaaga atatggtcca | 240 |
| atctactcta ttagaactgg tgcttctact atggttgtct tgaacactac tcaagttgcc | 300 |
| aaagaagcta tggttaccag atacttgtct atctctacca gaaagttgtc caacgccttg | 360 |
| aaaattttga ccgctgataa gtgcatggtt gccatttctg attacaacga tttccacaag | 420 |
| atgatcaaga gatatatctt gtctaacgtt ttgggtccat ctgcccaaaa aagacataga | 480 |
| tctaacagag ataccttgag agccaacgtt tgttctagat tgcattccca agttaagaac | 540 |
| tctccaagag aagctgtcaa ctttagaaga gttttcgaat gggaattatt cggtatcgct | 600 |
| ttgaaacaag ccttcggtaa ggatattgaa aagccaatct acgtcgaaga attgggtact | 660 |
| actttgtcca gagatgaaat cttcaaggtt ttggtcttgg acattatgga aggtgccatt | 720 |
| gaagttgatt ggagagattt tttcccatac ttgcgttgga ttccaaacac cagaatggaa | 780 |
| actaagatcc aaagattata ctttagaaga aaggccgtta tgaccgcctt gattaacgaa | 840 |
| caaaagaaaa gaattgcctc cggtgaagaa atcaactgct acatcgattt cttgttgaaa | 900 |
| gaaggtaaga ccttgaccat ggaccaaatc tctatgttgt tgtgggaaac cgttattgaa | 960 |
| actgctgata ccacaatggt tactactgaa tgggctatgt acgaagttgc taaggattct | 1020 |
| aaaagacaag acagattata ccaagaaatc caaaaggtct gcggttctga aatggttaca | 1080 |
| gaagaatact tgtcccaatt gccatacttg aatgctgttt tccacgaaac tttgagaaaa | 1140 |
| cattctccag ctgctttggt tccattgaga tatgctcatg aagatactca attgggtggt | 1200 |
| tattacattc cagccggtac tgaaattgcc attaacatct acggttgcaa catggacaaa | 1260 |
| caccaatggg aatctccaga agaatggaag ccagaaagat ttttggatcc taagtttgac | 1320 |
| ccaatggact tgtacaaaac tatggctttt ggtgctggta aaagagtttg cgctggttct | 1380 |
| ttacaagcta tgttgattgc ttgtccaacc atcggtagat tggttcaaga atttgaatgg | 1440 |
| aagttgagag atggtgaaga agaaaacgtt gatactgttg gtttgaccac ccataagaga | 1500 |
| tatccaatgc atgctatttt gaagccaaga tcttaa | 1536 |

SEQ ID NO: 170

| | |
|---|---|
| MATLLEHFQA MPFAIPIALA ALSWLFLFYI KVSFFSNKSA QAKLPPVPVV PGLPVIGNLL | 60 |
| QLKEKKPYQT FTRWAEEYGP IYSIRTGAST MVVLNITQVA KEAMVTRYLS ISTRKLSNAL | 120 |
| KILTADKCMV AISDYNDFHK MIKRYILSNV LGPSAQKRHR SNRDTLRANV CSRLHSQVKN | 180 |
| SPREAVNFRR VFEWELFGIA LKQAFGKDIE KPIYVEELGT TLSRDEIFKV LVLDIMEGAI | 240 |
| EVDWRDFFPY LRWIPNTRME TKIQRLYFRR KAVMTALINE QKKRIASGEE INCYIDFLLK | 300 |
| EGKILTMDQI SMLLWETVIE TADTTMVITE WAMYEVAKDS KRQDRLYQEI QKVCGSEMVT | 360 |
| EEYLSQLPYL NAVFHETLRK HSPAALVPLR YAHEDTQLGG YYIPAGTEIA INIYGCNMDK | 420 |
| HQWESPEEWK PERFLDPKFD PMDLYKTMAF GAGKRVCAGS LQAMLIACPT IGRLVQEFEW | 480 |
| KLRDGEEENV DTVGLITHKR YPMHAILKPR S | 511 |

SEQ ID NO: 171

| | |
|---|---|
| atggatgctg tgacgggttt gttaactgtc ccagcaaccg ctataactat tggtggaact | 60 |
| gctgtagcat tggcggtagc gctaatcttt tggtacctga aatcctacac atcagctaga | 120 |
| agatcccaat caaatcatct tccaagagtg cctgaagtcc caggtgttcc attgttagga | 180 |
| aatctgttac aattgaagga gaaaaagcca tacatgactt ttacgagatg ggcagcgaca | 240 |
| tatggaccta tctatagtat caaaactggg gctacaagta tggttgtggt atcatctaat | 300 |
| gagatagcca aggaggcatt ggtgaccaga ttccaatcca tatctacaag gaacttatct | 360 |
| aaagccctga aagtacttac agcagataag acaatggtcg caatgtcaga ttatgatgat | 420 |
| tatcataaaa cagttaagag acacatactg accgccgtct tgggtcctaa tgcacagaaa | 480 |
| aagcatagaa ttcacagaga tatcatgatg gataacatat ctactcaact tcatgaattc | 540 |
| gtgaaaaaca acccagaaca ggaagaggta gaccttagaa aaatctttca atctgagtta | 600 |
| ttcggcttag ctatgagaca agccttagga aaggatgttg aaagtttgta cgttgaagac | 660 |
| ctgaaaatca ctatgaatag agacgaaatc tttcaagtcc ttgttgttga tccaatgatg | 720 |
| ggagcaatcg atgttgattg gagagacttc tttccatacc taaagtgggt cccaaacaaa | 780 |
| aagttcgaaa atactattca acaaatgtac atcagaagag aagctgttat gaaatcttta | 840 |
| atcaaagagc acaaaaagag aatagcgtca ggcgaaaagc taaatagtta tatcgattac | 900 |
| cttttatctg aagctcaaac tttaaccgat cagcaactat tgatgtcctt gtgggaacca | 960 |
| atcattgaat cttcagatac aacaatggtc acaacagaat gggcaatgta cgaattagct | 1020 |
| aaaaacccta aattgcaaga taggttgtac agagacatta agtccgtctg tggatctgaa | 1080 |
| aagataaccg aagagcatct atcacagctg ccttacatta cagctatttt ccacgaaaca | 1140 |
| ctgagaagac actcaccagt tcctatcatt cctctaagac atgtacatga agataccgtt | 1200 |
| ctaggcggct accatgttcc tgctggcaca gaacttgccg ttaacatcta cggttgcaac | 1260 |
| atggacaaaa acgtttggga aaatccagag gaatggaacc cagaaagatt catgaaagag | 1320 |
| aatgagacaa ttgattttca aaagacgatg gccttcggtg gtggtaagag agtttgtgct | 1380 |
| ggttccttgc aagccctttt aactgcatct attgggattg ggagaatggt tcaagagttc | 1440 |
| gaatggaaac tgaaggatat gactcaagag gaagtgaaca cgataggcct aactacacaa | 1500 |
| atgttaagac cattgagagc tattatcaaa cctaggatct aa | 1542 |

SEQ ID NO: 172

| | |
|---|---|
| MDAVTGLLTV PATAITIGGT AVALAVALIF WYLKSYTSAR RSQSNHLPRV PEVPGVPLLG | 60 |
| NLLQLKEKKP YMTFTRWAAT YGPIYSIKTG ATSMVVVSSN EIAKEALVTR FQSISTRNLS | 120 |
| KALKVLTADK TMVAMSDYDD YHKTVKRHIL TAVLGPNAQK KHRIHRDIMM DNISTQLHEF | 180 |
| VKNNPEQEEV DLRKIFQSEL FGLAMRQALG KDVESLYVED LKITMNRDEI FQVLVVDPMM | 240 |
| GAIDVDWRDF FPYLKWVPNK KFENTIQQMY IRREAVMKSL IKEHKKRIAS GEKLNSYIDY | 300 |
| LLSEAQTLTD QQLLMSLWEP IIESSDTTMV TTEWAMYELA KNPKLQDRLY RDIKSVCGSE | 360 |
| KITEEHLSQL PYITAIFHET LRRHSPVPII PLRHVHEDTV LGGYHVPAGT ELAVNIYGCN | 420 |
| MDKNVWENPE EWNPERFMKE NETIDFQKTM AFGGGKRVCA GSLQALLTAS IGIGRMVQEF | 480 |
| EWKLKDMTQE EVNTIGLITQ MLRPLRAIIK PRI | 513 |

SEQ ID NO: 173

| | |
|---|---|
| atggccgaat tggatacctt ggatatcgtt gttttgggtg ttatcttctt gggtactgtt | 60 |
| gcttacttca ccaaaggtaa attgtggggt gttactaagg atccatacgc taatggtttt | 120 |
| gctgctggtg gtgcttctaa accaggtaga actagaaata tcgttgaagc catggaagaa | 180 |
| tctggtaaga actgtgttgt tttctacggt tctcaaactg gtactgctga agattatgct | 240 |
| tccagattgg ctaaagaagg taagagtaga ttcggtttga acaccatgat tgccgatttg | 300 |
| gaagattacg atttcgataa cttggatacc gtcccatctg ataacatcgt tatgtttgtt | 360 |
| ttggctacct acggtgaagg tgaacctact gataatgctg ttgacttcta cgaattcatt | 420 |
| accggtgaag atgcttcttt caacgaaggt aatgatccac cattgggtaa cttgaattac | 480 |
| gttgcttttg gtttgggtaa caacacctac gaacattaca actccatggt tagaaacgtc | 540 |
| aacaaggctt tggaaaaatt gggtgctcat agaattggtg aagctggtga aggtgatgat | 600 |
| ggtgctggta ctatggaaga agattttttg gcttggaaag acccaatgtg ggaagccttg | 660 |
| gctaaaaaga tgggtttgga agaaagagaa gctgtctacg aacctatttt cgccattaac | 720 |
| gaaagagatg atttgacccc tgaagccaat gaagtttatt tgggtgaacc taacaagttg | 780 |
| cacttggaag gtactgctaa aggtccattc aattctcaca acccatatat tgctccaatc | 840 |
| gccgaatctt acgaattatt ctctgctaag gatagaaact gcttgcacat ggaaattgac | 900 |
| atctctggtt ctaatttgaa gtacgaaacc ggtgatcata ttgccatttg gccaactaat | 960 |
| ccaggtgaag aagttaacaa gttcttggac atcttggact tgtccggtaa acaacattct | 1020 |
| gttgttactg ttaaggcctt ggaacctaca gctaaagttc cttttccaaa tccaactacc | 1080 |
| tacgatgcca ttttgagata ccatttggaa atttgcgctc cagtctctag acaattcgtt | 1140 |
| tctactttgg ctgcttttgc tccaaacgat gatattaagg ctgaaatgaa cagattgggt | 1200 |
| tccgataagg attacttcca cgaaaaaact ggtccacact actacaacat tgctagattt | 1260 |
| ttggcctctg tctctaaagg tgaaaagtgg actaagattc cattctccgc tttcattgaa | 1320 |
| ggtttgacta agttgcaacc tagatattac tccatctcct cctcatcttt ggttcaacct | 1380 |
| aagaagatct ctattaccgc cgttgttgaa tcccaacaaa ttccaggtag agatgatcct | 1440 |
| tttagaggtg ttgctaccaa ttacttgttc gccttgaaac aaaagcaaaa cggtgatcca | 1500 |
| aatcctgctc catttggtca atcttatgaa ttgactggtc caagaaacaa gtacgatggt | 1560 |
| attcatgttc cagttcacgt tagacactct aactttaagt tgccatctga tccaggtaag | 1620 |
| ccaattatca tgattggtcc aggtactggt gttgctccat tcagaggttt tgttcaagaa | 1680 |
| agagctaagc aagctagaga tggtgttgaa gttggtaaaa ccttgttgtt cttcggttgt | 1740 |
| agaaagtcca ctgaagattt catgtaccaa aaagaatggc aagaatacaa agaagcctta | 1800 |
| ggtgacaagt tcgaaatgat tactgccttc tcaagagaag gttctaagaa ggtttacgtc | 1860 |
| caacacagat tgaaagaaag atccaaagaa gtctccgatt tgttgtctca aaaggcctac | 1920 |
| ttttacgttt gtggtgatgc tgctcatatg gccagagaag ttaatactgt tttggcccaa | 1980 |
| attatcgctg aaggtagagg tgtatctgaa gctaagggtg aagaaatcgt taagaacatg | 2040 |
| agatccgcca atcaatacca agtttgctct gattttgtta ccttgcactg taaagaaacc | 2100 |
| acctacgcta attccgaatt gcaagaagat gtttggtcct aa | 2142 |

SEQ ID NO: 174

| | |
|---|---|
| MAELDTLDIV VLGVIFLGTV AYFTKGKLWG VTKDPYANGF AAGGASKPGR TRNIVEAMEE | 60 |
| SGKNCVVFYG SQTGTAEDYA SRLAKEGKSR FGLNTMIADL EDYDFDNLDT VPSDNIVMFV | 120 |
| LATYGEGEPT DNAVDFYEFI TGEDASFNEG NDPPLGNLNY VAFGLGNNTY EHYNSMVRNV | 180 |
| NKALEKLGAH RIGEAGEGDD GAGTMEEDFL AWKDPMWEAL AKKMGLEERE AVYEPIFAIN | 240 |
| ERDDLTPEAN EVYLGEPNKL HLEGTAKGPF NSHNPYIAPI AESYELFSAK DRNCLHMEID | 300 |
| ISGSNLKYET GDHIAIWPTN PGEEVNKFLD ILDLSGKQHS VVTVKALEPT AKVPFPNPTT | 360 |
| YDAILRYHLE ICAPVSRQFV STLAAFAPND DIKAEMNRLG SDKDYFHEKT GPHYYNIARF | 420 |
| LASVSKGEKW TKIPFSAFIE GLTKLQPRYY SISSSSLVQP KKISITAVVE SQQIPGRDDP | 480 |
| FRGVATNYLF ALKQKQNGDP NPAPFGQSYE LTGPRNKYDG IHVPVHVRHS NFKLPSDPGK | 540 |
| PIIMIGPGTG VAPFRGFVQE RAKQARDGVE VGKTLLFFGC RKSTEDFMYQ KEWQEYKEAL | 600 |
| GDKFEMITAF SREGSKKVYV QHRLKERSKE VSDLLSQKAY FYVCGDAAHM AREVNTVLAQ | 660 |
| IIAEGRGVSE AKGEEIVKNM RSANQYQVCS DFVTLHCKET TYANSELQED VWS | 713 |

SEQ ID NO: 175

| | |
|---|---|
| atggcttcag aaaaagaaat taggagagag agattcttga acgttttccc taaattagta | 60 |
| gaggaattga acgcatcgct tttggcttac ggtatgccta aggaagcatg tgactggtat | 120 |
| gcccactcat tgaactacaa cactccaggc ggtaagctaa atagaggttt gtccgttgtg | 180 |
| gacacgtatg ctattctctc caacaagacc gttgaacaat tggggcaaga agaatacgaa | 240 |
| aaggttgcca ttctaggttg gtgcattgag ttgttgcagg cttacttctt ggtcgccgat | 300 |
| gatatgatgg acaagtccat taccagaaga ggccaaccat gttggtacaa ggttcctgaa | 360 |
| gttggggaaa ttgccatcaa tgacgcattc atgttagagg ctgctatcta caagcttttg | 420 |
| aaatctcact tcagaaacga aaaatactac atagatatca ccgaattgtt ccatgaggtc | 480 |
| accttccaaa ccgaattggg ccaattgatg gacttaatca ctgcacctga agacaaagtc | 540 |
| gacttgagta agttctccct aaagaagcac tccttcatag ttactttcaa gactgcttac | 600 |
| tattctttct acttgcctgt cgcattggcc atgtacgttg ccggtatcac ggatgaaaag | 660 |
| gatttgaaac aagccagaga tgtcttgatt ccattgggtg aatacttcca aattcaagat | 720 |
| gactacttag actgcttcgg taccccagaa cagatcggta agatcggtac agatatccaa | 780 |
| gataacaaat gttcttgggt aatcaacaag gcattggaac ttgcttccgc agaacaaaga | 840 |
| aagactttag acgaaaatta cggtaagaag gactcagtcg cagaagccaa atgcaaaaag | 900 |
| attttcaatg acttgaaaat tgaacagcta taccacgaat atgaagagtc tattgccaag | 960 |
| gatttgaagg ccaaaatttc tcaggtcgat gagtctcgtg gcttcaaagc tgatgtctta | 1020 |
| actgcgttct tgaacaaagt ttacaagaga agcaaatag | 1059 |

SEQ ID NO: 176

| | |
|---|---|
| MASEKEIRRE RFLNVFPKLV EELNASLLAY GMPKEACDWY AHSLNYNTPG GKLNRGLSVV | 60 |
| DTYAILSNKT VEQLGQEEYE KVAILGWCIE LLQAYFLVAD DMMDKSITRR GQPCWYKVPE | 120 |
| VGEIAINDAF MLEAAIYKLL KSHFRNEKYY IDITELFHEV TFQTELGQLM DLITAPEDKV | 180 |
| DLSKFSLKKH SFIVTFKTAY YSFYLPVALA MYVAGITDEK DLKQARDVLI PLGEYFQIQD | 240 |
| DYLDCFGTPE QIGKIGTDIQ DNKCSWVINK ALELASAEQR KTLDENYGKK DSVAEAKCKK | 300 |
| IFNDLKIEQL YHEYEESIAK DLKAKISQVD ESRGFKADVL TAFLNKVYKR SK | 352 |

SEQ ID NO: 177

| | |
|---|---|
| atggtcgcac aaactttcaa cctggatacc tacttatccc aaagacaaca acaagttgaa | 60 |
| gaggccctaa gtgctgctct tgtgccagct tatcctgaga gaatatacga agctatgaga | 120 |
| tactccctcc tggcaggtgg caaaagatta agacctatct tatgtttagc tgcttgcgaa | 180 |
| ttggcaggtg gttctgttga acaagccatg ccaactgcgt gtgcacttga aatgatccat | 240 |
| acaatgtcac taattcatga tgacctgcca gccatggata acgatgattt cagaagagga | 300 |
| aagccaacta atcacaaggt gttcggggaa gatatagcca tcttagcggg tgatgcgctt | 360 |
| ttagcttacg cttttgaaca tattgcttct caaacaagag gagtaccacc tcaattggtg | 420 |
| ctacaagtta ttgctagaat cggacacgcc gttgctgcaa caggcctcgt tggaggccaa | 480 |
| gtcgtagacc ttgaatctga aggtaaagct atttccttag aaacattgga gtatattcac | 540 |
| tcacataaga ctggagcctt gctggaagca tcagttgtct caggcggtat tctcgcaggg | 600 |
| gcagatgaag agcttttggc cagattgtct cattacgcta gagatatagg cttggctttt | 660 |
| caaatcgtcg atgatatcct ggatgttact gctacatctg aacagttggg gaaaaccgct | 720 |
| ggtaaagacc aggcagccgc aaaggcaact tatccaagtc tattgggttt agaagcctct | 780 |
| agacagaaag cggaagagtt gattcaatct gctaaggaag ccttaagacc ttacggttca | 840 |
| caagcagagc cactcctagc gctggcagac ttcatcacac gtcgtcagca ttaa | 894 |

SEQ ID NO: 178

| | |
|---|---|
| MVAQTFNLDT YLSQRQQQVE EALSAALVPA YPERIYEAMR YSLLAGGKRL RPILCLAACE | 60 |
| LAGGSVEQAM PTACALEMIH TMSLIHDDLP AMDNDDFRRG KPTNHKVFGE DIAILAGDAL | 120 |
| LAYAFEHIAS QTRGVPPQLV LQVIARIGHA VAATGLVGGQ VVDLESEGKA ISLETLEYIH | 180 |
| SHKTGALLEA SVVSGGILAG ADEELLARLS HYARDIGLAF QIVDDILDVT ATSEQLGKTA | 240 |
| GKDQAAAKAT YPSLLGLEAS RQKAEELIQS AKEALRPYGS QAEPLLALAD FITRRQH | 297 |

SEQ ID NO: 179

| | |
|---|---|
| atggcacagc acacatcaga atccgcagct gtcgcaaagg gcagcagttt gacccctata | 60 |
| gtgagaactg acgctgagtc aaggagaaca agatggccaa ccgatgacga tgacgccgaa | 120 |
| cctttagtgg atgagatcag ggcaatgctt acttccatgt ctgatggtga catttccgtg | 180 |
| agcgcatacg atacagcctg ggtcggattg gttccaagat tagacggcgg tgaaggtcct | 240 |
| caatttccag cagctgtgag atggataaga aataaccagt tgcctgacgg aagttggggc | 300 |
| gatgccgcat tattctctgc ctatgacagg cttatcaata cccttgcctg cgttgtaact | 360 |
| ttgacaaggt ggtccctaga accagagatg agaggtagag gactatcttt tttgggtagg | 420 |
| aacatgtgga aattagcaac tgaagatgaa gagtcaatgc ctattggctt cgaattagca | 480 |
| tttccatctt tgatagagct tgctaagagc ctaggtgtcc atgacttccc ttatgatcac | 540 |
| caggccctac aaggaatcta ctcttcaaga gagatcaaaa tgaagaggat tccaaaagaa | 600 |
| gtgatgcata ccgttccaac atcaatattg cacagtttgg agggtatgcc tggcctagat | 660 |
| tgggctaaac tacttaaact acagagcagc gacggaagtt ttttgttctc accagctgcc | 720 |
| actgcatatg ctttaatgaa taccggagat gacaggtgtt ttagctacat cgatagaaca | 780 |
| gtaaagaaat tcaacggcgg cgtccctaat gtttatccag tggatctatt tgaacatatt | 840 |
| tgggccgttg atagacttga aagattagga atctccaggt acttccaaaa ggagatcgaa | 900 |
| caatgcatgg attatgtaaa caggcattgg actgaggacg gtatttgttg ggcaaggaac | 960 |
| tctgatgtca aagaggtgga cgacacagct atggccttta gacttcttag gttgcacggc | 1020 |
| tacagcgtca gtcctgatgt gtttaaaaac ttcgaaaagg acggtgaatt tttcgcattt | 1080 |
| gtcggacagt ctaatcaagc tgttaccggt atgtacaact taaacagagc aagccagata | 1140 |
| tccttcccag gcgaggatgt gcttcataga gctggtgcct tctcatatga gttcttgagg | 1200 |
| agaaaagaag cagagggagc tttgagggac aagtggatca tttctaaaga tctacctggt | 1260 |
| gaagttgtgt atactttgga ttttccatgg tacggcaact tacctagagt cgaggccaga | 1320 |
| gactacctag agcaatacgg aggtggtgat gacgtttgga ttggcaagac attgtatagg | 1380 |
| atgccacttg taaacaatga tgtatatttg gaattggcaa gaatggattt caaccactgc | 1440 |
| caggctttgc atcagttaga gtggcaagga ctaaaaagat ggtatactga aaataggttg | 1500 |
| atggactttg gtgtcgccca agaagatgcc cttagagctt attttcttgc agccgcatct | 1560 |
| gtttacgagc cttgtagagc tgccgagagg cttgcatggg ctagagccgc aatactagct | 1620 |
| aacgccgtga gcacccactt aagaaatagc ccatcattca gagaaaggtt agagcattct | 1680 |
| cttaggtgta gacctagtga agagacagat ggctcctggt ttaactcctc aagtggctct | 1740 |
| gatgcagttt tagtaaaggc tgtcttaaga cttactgatt cattagccag ggaagcacag | 1800 |
| ccaatccatg gaggtgaccc agaagatatt atacacaagt tgttaagatc tgcttgggcc | 1860 |
| gagtgggtta gggaaaaggc agacgctgcc gatagcgtgt gcaatggtag ttctgcagta | 1920 |
| gaacaagagg gatcaagaat ggtccatgat aaacagacct gtctattatt ggctagaatg | 1980 |
| atcgaaattt ctgccggtag ggcagctggt gaagcagcca gtgaggacgg cgatagaaga | 2040 |
| ataattcaat taacaggctc catctgcgac agtcttaagc aaaaaatgct agtttcacag | 2100 |
| gaccctgaaa aaaatgaaga gatgatgtct cacgtggatg acgaattgaa gttgaggatt | 2160 |
| agagagttcg ttcaatattt gcttagacta ggtgaaaaaa agactggatc tagcgaaacc | 2220 |
| aggcaaacat ttttaagtat agtgaaatca tgttactatg ctgctcattg cccacctcat | 2280 |
| gtcgttgata gacacattag tagagtgatt ttcgagccag taagtgccgc aaagtaa | 2337 |

SEQ ID NO: 180

| | |
|---|---|
| MAQHTSESAA VAKGSSLTPI VRTDAESRRT RWPTDDDDAE PLVDEIRAML TSMSDGDISV | 60 |
| SAYDTAWVGL VPRLDGGEGP QFPAAVRWIR NNQLPDGSWG DAALFSAYDR LINTLACVVT | 120 |
| LTRWSLEPEM RGRGLSFLGR NMWKLATEDE ESMPIGFELA FPSLIELAKS LGVHDFPYDH | 180 |
| QALQGIYSSR EIKMKRIPKE VMHTVPTSIL HSLEGMPGLD WAKLLKLQSS DGSFLFSPAA | 240 |
| TAYALMNTGD DRCFSYIDRT VKKFNGGVPN VYPVDLFEHI WAVDRLERLG ISRYFQKEIE | 300 |
| QCMDYVNRHW TEDGICWARN SDVKEVDDTA MAFRLLRLHG YSVSPDVFKN FEKDGEFFAF | 360 |
| VGQSNQAVTG MYNLNRASQI SFPGEDVLHR AGAFSYEFLR RKEAEGALRD KWIISKDLPG | 420 |
| EVVYTLDFPW YGNLPRVEAR DYLEQYGGGD DVWIGKTLYR MPLVNNDVYL ELARMDFNHC | 480 |
| QALHQLEWQG LKRWYTENRL MDFGVAQEDA LRAYFLAAAS VYEPCRAAER LAWARAAILA | 540 |
| NAVSTHLRNS PSFRERLEHS LRCRPSEETD GSWFNSSSGS DAVLVKAVLR LTDSLAREAQ | 600 |
| PIHGGDPEDI IHKLLRSAWA EWVREKADAA DSVCNGSSAV EQEGSRMVHD KQTCLLLARM | 660 |
| IEISAGRAAG EAASEDGDRR IIQLTGSICD SLKQKMLVSQ DPEKNEEMMS HVDDELKLRI | 720 |
| REFVQYLLRL GEKKTGSSET RQTFLSIVKS CYYAAHCPPH VVDRHISRVI FEPVSAAK | 778 |

SEQ ID NO: 181

| | |
|---|---|
| atgtctatta atttgagatc ttccggttgt agctccccaa taagcgcaac tttggaaagg | 60 |
| ggtctagact ctgaagttca aacaagagca aacaatgtat cttttgagca gaccaaagag | 120 |
| aagatcagga aaatgcttga gaaggtcgag ttgagcgtga gtgcctatga cactagttgg | 180 |
| gtagctatgg tcccatcacc atccagtcaa aacgcacctc ttttcccaca gtgcgtcaaa | 240 |
| tggctacttg ataatcaaca tgaggacggc tcttggggat tggataacca cgaccatcag | 300 |
| agcttaaaga aagatgtgtt gtcatccaca ttagcctcta tcctagctct taagaaatgg | 360 |
| ggaataggcg aaagacagat caataagggt ctacagttca ttgaattaaa ctctgcacta | 420 |
| gttaccgatg aaactataca aaaacctaca ggtttcgaca tcatttttcc aggaatgatt | 480 |
| aagtacgcca gggaccttaa tttgaccata cctcttggct cagaagtagt cgacgatatg | 540 |
| atcaggaaaa gagatctaga cttaaagtgt gatagcgaga aattcagcaa aggtagagag | 600 |
| gcttatcttg cctatgttct tgaaggaact aggaacttga aggactggga cttaattgtg | 660 |
| aaatatcaga gaaagaacgg tagtctattt gatagtccag ctacaaccgc cgcagctttc | 720 |
| actcaatttg gcaatgacgg ttgcttgagg tacttatgtt cacttttaca gaaattcgag | 780 |
| gccgcagtgc ctagtgtata tccatttgat caatacgcta gattaagcat aatcgtcact | 840 |
| ttagaatcat tgggaattga cagagatttc aagactgaga taaaaagcat attggatgag | 900 |
| acctataggt actggcttag aggtgacgaa gaaatttgcc tagatttggc cacatgtgca | 960 |
| cttgctttta ggttgctttt agcccacggc tatgacgtgt catacgatcc tctaaagcca | 1020 |
| tttgcagagg aatctggttt cagcgatacc cttgagggat atgttaaaaa caccttttcc | 1080 |
| gtattagagc ttttcaaggc tgcccaaagt taccctcatg agagtgcttt gaaaaagcag | 1140 |
| tgttgctgga caaaacaata tctagaaatg gaactaagtt catgggttaa aacaagcgtt | 1200 |
| agggacaagt acttgaaaaa ggaagtggag gatgctttgg catttccatc atatgcctct | 1260 |
| ttagaaagaa gtgaccacag aaggaaaatt cttaatggct cagcagttga aaacacaaga | 1320 |
| gtaaccaaga cctcttacag gttgcataat atatgtacat cagatatctt aaaacttgct | 1380 |
| gtcgacgatt tcaacttttg ccaatctatt catagagagg aaatggaaag attggataga | 1440 |
| tggatagtgg agaatagact acaggaatta aagttcgcca gacaaaaatt ggcttactgt | 1500 |
| tactttagtg gcgctgccac actattctct ccagaattgt ctgacgcaag gatctcatgg | 1560 |
| gctaagggag gtgttctaac cacagtagtc gatgactttt ttgatgttgg cggtagtaaa | 1620 |
| gaagagcttg agaacttaat tcacttggtg gaaaagtggg atcttaatgg agttcctgaa | 1680 |
| tactcttcag agcatgtaga aataattttc tctgtcctaa gagacactat cttagaaacc | 1740 |
| ggtgataaag cctttacata tcagggcaga aacgttactc accatattgt gaaaatatgg | 1800 |
| ttggacttac ttaagagcat gctaagggag gctgaatggt ccagtgacaa atcaacccca | 1860 |
| tctttggaag attacatgga gaatgcctat atcagcttcg cattaggtcc tattgtattg | 1920 |
| ccagctacat accttatagg acctccacta cctgaaaaga ctgtcgactc ccaccaatat | 1980 |
| aatcaattat acaaattggt tagtaccatg ggtagactat taaacgatat ccagggcttt | 2040 |
| aagagggaat cagccgaggg aaaacttaat gcagtgtctc tacatatgaa gcatgaaaga | 2100 |
| gacaacagaa gcaaagaggt tattatagaa tccatgaaag gattggctga aaggaaaaga | 2160 |
| gaggaattac acaaacttgt actagaagag aaaggtagtg tcgttccaag agaatgcaag | 2220 |
| gaagccttct taaaaatgtc aaaagtgttg aacctttttt ataggaagga tgatggcttc | 2280 |
| acatctaacg acttgatgag ccttgtgaaa tccgtcatct acgagcctgt ttcacttcaa | 2340 |
| aaggagagtc taacttga | 2358 |

SEQ ID NO: 182

| | |
|---|---|
| MSINLRSSGC SSPISATLER GLDSEVQTRA NNVSFEQTKE KIRKMLEKVE LSVSAYDTSW | 60 |
| VAMVPSPSSQ NAPLFPQCVK WLLDNQHEDG SWGLDNHDHQ SLKKDVLSST LASILALKKW | 120 |
| GIGERQINKG LQFIELNSAL VIDETIQKPT GFDIIFPGMI KYARDLNLTI PLGSEVVDDM | 180 |
| IRKRDLDLKC DSEKFSKGRE AYLAYVLEGT RNLKDWDLIV KYQRKNGSLF DSPATTAAAF | 240 |
| TQFGNDGCLR YLCSLLQKFE AAVPSVYPFD QYARLSIIVT LESLGIDRDF KTEIKSILDE | 300 |
| TYRYWLRGDE EICLDLATCA LAFRLLLAHG YDVSYDPLKP FAEESGFSDT LEGYVKNTFS | 360 |
| VLELFKAAQS YPHESALKKQ CCWTKQYLEM ELSSWVKTSV RDKYLKKEVE DALAFPSYAS | 420 |
| LERSDHRRKI LNGSAVENTR VIKTSYRLHN ICTSDILKLA VDDFNFCQSI HREEMERLDR | 480 |
| WIVENRLQEL KFARQKLAYC YFSGAATLFS PELSDARISW AKGGVLTTVV DDFFDVGGSK | 540 |
| EELENLIHLV EKWDLNGVPE YSSEHVEIIF SVLRDTILET GDKAFTYQGR NVTHHIVKIW | 600 |
| LDLLKSMLRE AEWSSDKSTP SLEDYMENAY ISFALGPIVL PATYLIGPPL PEKTVDSHQY | 660 |
| NQLYKLVSTM GRLLNDIQGF KRESAEGKLN AVSLHMKHER DNRSKEVIIE SMKGLAERKR | 720 |
| EELHKLVLEE KGSVVPRECK EAFLKMSKVL NLFYRKDDGF TSNDLMSLVK SVIYEPVSLQ | 780 |
| KESLT | 785 |

SEQ ID NO: 183

| | |
|---|---|
| atgatgagta attttgttac tttgattgag ccattagaac ttaccggttc aagggttcta | 60 |
| agaatcgccg tggcgttcgc ggctttgtgt ggtgccaccg gtttgctggc cttttcctgg | 120 |
| tggatttata agcaaagctc tagtaagcca acgcttccgt accctgtagt tggcgataca | 180 |
| catgcacaaa gcttggaaaa aaatttaatc aaaggaatgc aacaatacag agacagtcca | 240 |
| tttttcctag ccggaagcag acctccgtta ctaattttgc ctatgtccgt ttttcatgag | 300 |
| atccataaca tgcctaacga atatatatct attatcgttg agcacgaaga caaattccaa | 360 |
| ggcaagtata cccatataac tacaataaga ccagaaattc ctgcaacaat aagacaagat | 420 |
| ttaacaagga acatgccaaa tatcatacta gaattgcaag atgaactaac atacgcctca | 480 |
| gaccaatggc ctagaacatc caaatggtct tcagtttcac tatatgacat gatgttgagg | 540 |
| actgtagccc tgctgtcagg tagagctttc gttggcttac cactatgtag agatgaggga | 600 |
| tggttgcagg caagtatagg ttatacagtc caatgcgttt caataagaga tcagcttttt | 660 |
| acttggagcc ccgtattgag accaattatc gggccattct tgccctcagt tagaagtgtg | 720 |
| aggagacact tgagatttgc tgcagaaatt atggctcctc ttatcagtca ggctttacaa | 780 |
| gatgaaaagc aacacagggc tgatacactt ttagcagatc agaccgaagg tcgtggcacg | 840 |
| tttatttctt ggttactgag acacctgcca gaagaattac gtactcctga gcaagtagga | 900 |
| ctggaccaga tgcttgtatc ttttgccgca attcacacta caacaatggc tctaaccaaa | 960 |
| gtcgtgtggg aattagttaa gagaccagaa tacatcgaac ccttgagaac tgaaatgcaa | 1020 |
| gatgtcttcg ggcccgatgc ggtttcacca gacatttgca ttaataaaga ggccctatcc | 1080 |
| aggttgcata aattggattc ttttattagg gaggttcaaa gatggtgtcc ttccactttt | 1140 |
| gttactccta gccgtagagt gatgaagtcc atgacgctga gcaacggaat taaactgcaa | 1200 |
| cgtggtacga gtattgcttt tcctgctcat gctatacata tgtcagaaga aacacctact | 1260 |
| ttttcacctg acttttcttc tgacttcgaa aatccttccc ctagaatttt tgatgggttc | 1320 |
| cgttatttaa acttgaggtc aatcaaggga caaggaagcc agcatcaagc ggctactacc | 1380 |
| ggtcctgatt acttaatttt taaccatggt aaacatgctt gccctggtag attttttgct | 1440 |
| atttcagaaa taaaaatgat cttgatagag ttactagcta agtacgattt caggttggaa | 1500 |
| gacggaaaac cagggcctga actaatgaga gttggtactg agacaagatt ggatacaaag | 1560 |
| gcaggtttgg agatgagacg tagataa | 1587 |

SEQ ID NO: 184

| | |
|---|---|
| MMSNFVTLIE PLELTGSRVL RIAVAFAALC GATGLLAFSW WIYKQSSSKP TLPYPVVGDT | 60 |
| HAQSLEKNLI KGMQQYRDSP FFLAGSRPPL LILPMSVFHE IHNMPNEYIS IIVEHEDKFQ | 120 |
| GKYTHITTIR PEIPATIRQD LTRNMPNIIL ELQDELTYAS DQWPRTSKWS SVSLYDMMLR | 180 |
| TVALLSGRAF VGLPLCRDEG WLQASIGYTV QCVSIRDQLF TWSPVLRPII GPFLPSVRSV | 240 |
| RRHLRFAAEI MAPLISQALQ DEKQHRADTL LADQTEGRGT FISWLLRHLP EELRTPEQVG | 300 |
| LDQMLVSFAA IHTTIMALTK VVWELVKRPE YIEPLRTEMQ DVFGPDAVSP DICINKEALS | 360 |
| RLHKLDSFIR EVQRWCPSTF VITSRRVMKS MTLSNGIKLQ RGTSIAFPAH AIHMSEETPT | 420 |
| FSPDFSSDFE NPSPRIFDGF RYLNLRSIKG QGSQHQAATT GPDYLIFNHG KHACPGRFFA | 480 |
| ISEIKMILIE LLAKYDFRLE DGKPGPELMR VGTETRLDTK AGLEMRRR | 528 |

SEQ ID NO: 185

| | |
|---|---|
| atgatgtcca acttcgttac cttgatcgaa ccattggaat tgactggttc tagagttttg | 60 |
| agaattgctg ttgcttttgc tgctttgtgt ggtgctactg gtttgttggc tttttcttgg | 120 |
| tggatctaca agcaatcttc ttcaaaacct actttgccat acccagttgt tggtgatact | 180 |
| catgctcaat ctttggaaaa gaacttgatt aagggtatgc aacaatacag agactcccca | 240 |
| ttctttttgg ctggttcaag accaccatta ttgatcttgc caatgtctgt tttccacgaa | 300 |
| atccataaca tgccaaacga atatatctcc atcatcgttg aacacgaaga taagttccaa | 360 |
| ggtaaataca cccatatcac taccatcaga ccagaaattc cagctaccat tagacaagat | 420 |
| ttgaccagaa acatgcctaa catcatcttg gaattgcaag acgaattgac ctacgcttct | 480 |
| gatcaatggc caagaacttc taagtggtcc tctgtttcat tatacgacat gatgttgaga | 540 |
| accgttgctt tgttgtctgg tagagctttt gttggtttgc cattgtgtag agatgaaggt | 600 |
| tggttgcaag cttctattgg ttacactgtt caatgcgtgt ctatcagaga tcagttgttt | 660 |
| acttggtccc cagttttgag gccaattatt ggtccatttt tgccatccgt tagatctgtt | 720 |
| agaaggcatt tgagattcgc tgctgaaatt atggctccat tgatttctca agccttgcaa | 780 |
| gacgaaaaac aacatagagc tgataccttg ttggctgatc aaactgaagg tagaggtact | 840 |
| ttcatttcct ggttgttgag acatttgcca gaagaattga gaaccccaga acaagttggt | 900 |
| ttggatcaaa tgttggtttc ctttgctgct attcatacca ctactatggc tttgacaaag | 960 |
| gttgtttggg aattggtaaa aaggccagag tacattgaac cattgagaac cgaaatgcaa | 1020 |
| gatgtttttg gtccagatgc tgtttctcca gatatctgca ttaacaaaga agccttgtcc | 1080 |
| agattgcaca agttggattc tttcatcaga gaagttcaaa gatggtgtcc atctactttc | 1140 |
| gttactccat ctagaagagt catgaagtct atgactttgt ccaacggtat caagttgcaa | 1200 |
| agaggtactt ctattgcttt tccagctcat gccattcaca tgtctgaaga aactccaaca | 1260 |
| ttttccccag atttctcttc cgattttgaa aacccatccc caagaatttt cgacggtttt | 1320 |
| agatacttga acttgaggtc cattaagggt caaggttcac aacatcaagc tgctactact | 1380 |
| ggtccagatt acttgatttt caatcatggt aaacatgcct gcccaggtag attttttgct | 1440 |
| atctctgaaa tcaagatgat tttgatcgag ttgttggcca agtacgactt cagattggaa | 1500 |
| gatggtaaac caggtccaga attgatgaga gttggtactg aaactagatt ggataccaaa | 1560 |
| gctggtttgg aaatgagaag aaggtga | 1587 |

SEQ ID NO: 186

| | |
|---|---|
| MMSNFVTLIE PLELTGSRVL RIAVAFAALC GATGLLAFSW WIYKQSSSKP TLPYPVVGDT | 60 |
| HAQSLEKNLI KGMQQYRDSP FFLAGSRPPL LILPMSVFHE IHNMPNEYIS IIVEHEDKFQ | 120 |
| GKYTHITTIR PEIPATIRQD LTRNMPNIIL ELQDELTYAS DQWPRTSKWS SVSLYDMMLR | 180 |
| TVALLSGRAF VGLPLCRDEG WLQASIGYTV QCVSIRDQLF TWSPVLRPII GPFLPSVRSV | 240 |
| RRHLRFAAEI MAPLISQALQ DEKQHRADTL LADQTEGRGT FISWLLRHLP EELRTPEQVG | 300 |
| LDQMLVSFAA IHTTIMALTK VVWELVKRPE YIEPLRTEMQ DVFGPDAVSP DICINKEALS | 360 |
| RLHKLDSFIR EVQRWCPSTF VTPSRRVMKS MTLSNGIKLQ RGTSIAFPAH AIHMSEETPT | 420 |
| FSPDFSSDFE NPSPRIFDGF RYLNLRSIKG QGSQHQAATT GPDYLIFNHG KHACPGRFFA | 480 |
| ISEIKMILIE LLAKYDFRLE DGKPGPELMR VGTETRLDTK AGLEMRRR | 528 |

SEQ ID NO: 187

| | |
|---|---|
| atggcggaat tagatacgtt agatatcgtt gttttaggcg ctttattgtt gggcacatta | 60 |
| gcgtatttta cgaagggcac attatggggt gtcactaagg atccttatgc aaacgctttc | 120 |
| gcaaatgcta acggagctaa agccggcaga tcaagaaata tcgttgaaaa aatggatgaa | 180 |
| tctggtaaaa actgcgtcat attctacggt tctcaaactg gaacggcaga ggattacgca | 240 |
| tcaagattag cgaaagaagg aaagtcaaga ttcgggttag ggactatggt tgcagattta | 300 |
| gaagaatatg attatgataa ccttgataca atgagcggcg ataaggttgc catgtttgtt | 360 |
| cttgctacct atggcgaggg cgaaccaact gacaacgcag tagagtttta tgaatttatt | 420 |
| actggtgaag gggttgcttt tagtgaagga aacgatcccc ccttaggcaa tctgaactac | 480 |
| gtggcctttg gactggggaa caatacttat gaacactaca attcaatggt cagaaatgtc | 540 |
| gataaagccc ttaggaatct gggtgctcat aggatcggag aggctggtga aggcgatgac | 600 |
| ggtgctggca caatggaaga agattttcta gcatggaagg aaccaatgtg ggccgcctta | 660 |
| gctgacaaaa tgggtttgga ggaaagggaa gcagtatatg accctgtgtt cagtatcgtt | 720 |
| gatcgtgata atttgactcc tgaaagccca gaagtctatt tgggtgaacc taataaaatg | 780 |
| catttagagg atgcggtcaa gggcccattt aattctcata atccatatat agcaccaata | 840 |
| gctgaatcta gagaattgtt tagtgttaaa gacaggaatt gcatccatat ggaaattgac | 900 |
| atagacggtt caaatttgag ctatcaaact ggggatcatg tggctatttg gcctaccaac | 960 |
| ccaggagatg aagtggatag atttttagac atcattgatt taaaggataa acgtgacaag | 1020 |
| gttataggag tgaaagcact tgaaccaact gcaaaggtcc cttttccaac accaacaaca | 1080 |
| tatgacgtta tcgccaggta tcatttagaa atctgtgcac cggtctctag acagtttgtg | 1140 |
| tccactctag cagcattctc cccaaatgat gaggtaaaag cagaaatgac tagattgggt | 1200 |
| aacgataagg attattttca tgataagacg ggcccacatt attataatat cgcccgtttt | 1260 |
| ctagctgcgg ttggtaaggg cgagaaatgg tcaaatatcc ctttttctgt ttttgtcgaa | 1320 |
| ggtttaacga aattacaacc aagatattat tcaatctcct cttcaagcct agtacaacca | 1380 |
| aaaaaaatat caataacggc agtaattgag tcacaggtta tacctgccag gcaagatcca | 1440 |
| tttagaggtg tagctacgaa ctacttattt gcattgaaac agaagcaaaa cggtgatcca | 1500 |
| aatccctccc catttggaca tacttatgca ttaaacggcc ctagaaataa atttgacggt | 1560 |
| atacacgtcc ccgtccacgt aaggcactcc aatttcaaac taccgagcga tccagcaaaa | 1620 |
| ccagttatta tggttggtcc aggaactgga gtggctccgt ttagaggttt catccaagag | 1680 |
| agagctaaac aggcccagga tggggccaca gtaggccgta ctatcttgtt cttcggttgc | 1740 |
| caacgtaggt ccgaagattt tttgtacgaa agtgaatgga aagaatacaa ggaagttcta | 1800 |
| ggagataccc ttgagatagt cactgccttc tccagggaaa catcaaagaa agtttatgtg | 1860 |
| cagcacaggt tgaaagagag atccaaagaa atcggagaac tattatcaca gaaagcatac | 1920 |
| ttttatgtgt gtggcgatgc tgctcatatg gctagagaag ttaatactgt attggctcaa | 1980 |
| attatcgctg aatctagggg tgtaagtgaa gccaagggtg aagagattgt taaaaatatg | 2040 |
| agggctgcta atcagtacca agttaggagg gggaacaatg tctttttttg ggctataagt | 2100 |
| ggttctattg atatgacggc caataccgcc aacttacaag aagatgtgtg gagctga | 2157 |

SEQ ID NO: 188

| | |
|---|---|
| MAELDTLDIV VLGALLLGTL AYFTKGTLWG VTKDPYANAF ANANGAKAGR SRNIVEKMDE | 60 |
| SGKNCVIFYG SQTGTAEDYA SRLAKEGKSR FGLGTMVADL EEYDYDNLDT MSGDKVAMFV | 120 |
| LATYGEGEPT DNAVEFFEFI TGEGVAFSEG NDPPLGNLNY VAFGLGNNTY EHYNSMVRNV | 180 |
| DKALRNLGAH RIGEAGEGDD GAGTMEEDFL AWKEPMWAAL ADKMGLEERE AVYDPVFSIV | 240 |
| DRDNLTPESP EVYLGEPNKM HLEDAVKGPF NSHNPYIAPI AESRELFSVK DRNCIHMEID | 300 |
| IDGSNLSYQT GDHVAIWPTN PGDEVDRFLD IIDLKDKRDK VIGVKALEPT AKVPFPTPTT | 360 |
| YDVIARYHLE ICAPVSRQFV STLAAFSPND EVKAEMTRLG NDKDYFHDKT GPHYYNIARF | 420 |
| LAAVGKGEKW SNIPFSVFVE GLTKLQPRYY SISSSSLVQP KKISITAVIE SQVIPARQDP | 480 |
| FRGVATNYLF ALKQKQNGDP NPSPFGHTYA LNGPRNKFDG IHVPVHVRHS NFKLPSDPAK | 540 |
| PVIMVGPGTG VAPFRGFIQE RAKQAQDGAT VGRTILFFGC QRRSEDFLYE SEWKEYKEVL | 600 |
| GDTLEIVTAF SRETSKKVYV QHRLKERSKE IGELLSQKAY FYVCGDAAHM AREVNTVLAQ | 660 |
| IIAESRGVSE AKGEEIVKNM RAANQYQVRR GNNVFFWAIS GSIDMTANTA NLQEDVWS | 718 |

SEQ ID NO: 189

| | |
|---|---|
| atggcggaat tagatacgtt agatatcgtt gttttaggcg ctttattgtt gggcacatta | 60 |
| gcgtatttta cgaagggcac attatggggt gtcactaagg atccttatgc aaacgctttc | 120 |
| gcaaatgcta acggagctaa agccggcaga tcaagaaata tcgttgaaaa aatggatgaa | 180 |
| tctggtaaaa actgcgtcat attctacggt tctcaaactg gaacggcaga ggattacgca | 240 |
| tcaagattag cgaaagaagg aaagtcaaga ttcgggttag ggactatggt tgcagattta | 300 |
| gaagaatatg attatgataa ccttgataca atgagcggcg ataaggttgc catgtttgtt | 360 |
| cttgctacct atggcgaggg cgaaccaact gacaacgcag tagagtttta tgaatttatt | 420 |
| actggtgaag gggttgcttt tagtgaagga aacgatcccc ccttaggcaa tctgaactac | 480 |
| gtggcctttg gactggggaa caatacttat gaacactaca attcaatggt cagaaatgtc | 540 |
| gataaagccc ttaggaatct gggtgctcat aggatcggag aggctggtga aggcgatgac | 600 |
| ggtgctggca caatggaaga agattttcta gcatggaagg aaccaatgtg ggccgcctta | 660 |
| gctgacaaaa tgggtttgga ggaaagggaa gcagtatatg accctgtgtt cagtatcgtt | 720 |
| gatcgtgata atttgactcc tgaaagccca gaagtctatt tgggtgaacc taataaaatg | 780 |
| catttagagg atgcggtcaa gggcccattt aattctcata atccatatat agcaccaata | 840 |
| gctgaatcta gagaattgtt tagtgttaaa gacaggaatt gcatccatat ggaaattgac | 900 |
| atagacggtt caaatttgag ctatcaaact ggggatcatg tggctatttg gcctaccaac | 960 |
| ccaggagatg aagtggatag atttttagac atcattgatt taaaggataa acgtgacaag | 1020 |
| gttataggag tgaaagcact tgaaccaact gcaaaggtcc cttttccaac accaacaaca | 1080 |
| tatgacgtta tcgccaggta tcatttagaa atctgtgcac cggtctctag acagtttgtg | 1140 |
| tccactctag cagcattctc cccaaatgat gaggtaaaag cagaaatgac tagattgggt | 1200 |
| aacgataagg attattttca tgataagacg ggcccacatt attataatat cgcccgtttt | 1260 |
| ctagctgcgg ttggtaaggg cgagaaatgg tcaaatatcc ctttttctgt ttttgtcgaa | 1320 |
| ggtttaacga aattacaacc aagatattat tcaatctcct cttcaagcct agtacaacca | 1380 |
| aaaaaaatat caataacggc agtaattgag tcacaggtta tacctgccag gcaagatcca | 1440 |
| tttagaggtg tagctacgaa ctacttattt gcattgaaac agaagcaaaa cggtgatcca | 1500 |
| aatccctccc catttggaca tacttatgca ttaaacggcc ctagaaataa atttgacggt | 1560 |
| atacacgtcc ccgtccacgt aaggcactcc aatttcaaac taccgagcga tccagcaaaa | 1620 |
| ccagttatta tggttggtcc aggaactgga gtggctccgt ttagaggttt catccaagag | 1680 |
| agagctaaac aggcccagga tggggccaca gtaggccgta ctatcttgtt cttcggttgc | 1740 |
| caacgtaggt ccgaagattt tttgtacgaa agtgaatgga aagaatacaa ggaagttcta | 1800 |
| ggagataccc ttgagatagt cactgccttc tccagggaaa catcaaagaa agtttatgtg | 1860 |
| cagcacaggt tgaaagagag atccaaagaa atcggagaac tattatcaca gaaagcatac | 1920 |
| ttttatgtgt gtggcgatgc tgctcatatg gctagagaag ttaatactgt attggctcaa | 1980 |
| attatcgctg aatctagggg tgtaagtgaa gccaagggtg aagagattgt taaaaatatg | 2040 |
| agggctgcta atcagtacca agaagatgtg tggagctga | 2079 |

SEQ ID NO: 190

| | |
|---|---|
| MAELDTLDIV VLGALLLGTL AYFTKGTLWG VTKDPYANAF ANANGAKAGR SRNIVEKMDE | 60 |
| SGKNCVIFYG SQTGTAEDYA SRLAKEGKSR FGLGTMVADL EEYDYDNLDT MSGDKVAMFV | 120 |
| LATYGEGEPT DNAVEFFEFI TGEGVAFSEG NDPPLGNLNY VAFGLGNNTY EHYNSMVRNV | 180 |
| DKALRNLGAH RIGEAGEGDD GAGTMEEDFL AWKEPMWAAL ADKMGLEERE AVYDPVFSIV | 240 |
| DRDNLTPESP EVYLGEPNKM HLEDAVKGPF NSHNPYIAPI AESRELFSVK DRNCIHMEID | 300 |
| IDGSNLSYQT GDHVAIWPTN PGDEVDRFLD IIDLKDKRDK VIGVKALEPT AKVPFPTPTT | 360 |
| YDVIARYHLE ICAPVSRQFV STLAAFSPND EVKAEMTRLG NDKDYFHDKT GPHYYNIARF | 420 |
| LAAVGKGEKW SNIPFSVFVE GLTKLQPRYY SISSSSLVQP KKISITAVIE SQVIPARQDP | 480 |
| FRGVATNYLF ALKQKQNGDP NPSPFGHTYA LNGPRNKFDG IHVPVHVRHS NFKLPSDPAK | 540 |
| PVIMVGPGTG VAPFRGFIQE RAKQAQDGAT VGRTILFFGC QRRSEDFLYE SEWKEYKEVL | 600 |
| GDTLEIVTAF SRETSKKVYV QHRLKERSKE IGELLSQKAY FYVCGDAAHM AREVNTVLAQ | 660 |
| IIAESRGVSE AKGEEIVKNM RAANQYQEDV WS | 692 |

SEQ ID NO: 191

| | |
|---|---|
| atggccgaat tggatacctt ggatatcgtt gttttgggtg ttatcttctt gggtactgtt | 60 |
| gcttacttca ccaaaggtaa attgtggggt gttactaagg atccatacgc taatggtttt | 120 |
| gctgctggtg gtgcttctaa accaggtaga actagaaata tcgttgaagc catggaagaa | 180 |
| tctggtaaga actgtgttgt tttctacggt tctcaaactg gtactgctga agattatgct | 240 |
| tccagattgg ctaaagaagg taagagtaga ttcggtttga acaccatgat tgccgatttg | 300 |
| gaagattacg atttcgataa cttggatacc gtcccatctg ataacatcgt tatgtttgtt | 360 |
| ttggctacct acggtgaagg tgaacctact gataatgctg ttgacttcta cgaattcatt | 420 |
| accggtgaag atgcttcttt caacgaaggt aatgatccac cattgggtaa cttgaattac | 480 |
| gttgcttttg gtttgggtaa caacacctac gaacattaca actccatggt tagaaacgtc | 540 |
| aacaaggctt tggaaaaatt gggtgctcat agaattggtg aagctggtga aggtgatgat | 600 |
| ggtgctggta ctatggaaga agattttttg gcttggaaag acccaatgtg ggaagccttg | 660 |
| gctaaaaaga tgggtttgga agaaagagaa gctgtctacg aacctatttt cgccattaac | 720 |
| gaaagagatg atttgacccc tgaagccaat gaagtttatt tgggtgaacc taacaagttg | 780 |
| cacttggaag gtactgctaa aggtccattc aattctcaca acccatatat tgctccaatc | 840 |
| gccgaatctt acgaattatt ctctgctaag gatagaaact gcttgcacat ggaaattgac | 900 |
| atctctggtt ctaatttgaa gtacgaaacc ggtgatcata ttgccatttg gccaactaat | 960 |
| ccaggtgaag aagttaacaa gttcttggac atcttggact tgtccggtaa acaacattct | 1020 |
| gttgttactg ttaaggcctt ggaacctaca gctaaagttc cttttccaaa tccaactacc | 1080 |
| tacgatgcca ttttgagata ccatttggaa atttgcgctc cagtctctag acaattcgtt | 1140 |
| tctactttgg ctgcttttgc tccaaacgat gatattaagg ctgaaatgaa cagattgggt | 1200 |
| tccgataagg attacttcca cgaaaaaact ggtccacact actacaacat tgctagattt | 1260 |
| ttggcctctg tctctaaagg tgaaaagtgg actaagattc cattctccgc tttcattgaa | 1320 |
| ggtttgacta agttgcaacc tagatattac tccatctcct cctcatcttt ggttcaacct | 1380 |
| aagaagatct ctattaccgc cgttgttgaa tcccaacaaa ttccaggtag agatgatcct | 1440 |
| tttagaggtg ttgctaccaa ttacttgttc gccttgaaac aaaagcaaaa cggtgatcca | 1500 |
| aatcctgctc catttggtca atcttatgaa ttgactggtc caagaaacaa gtacgatggt | 1560 |
| attcatgttc cagttcacgt tagacactct aactttaagt tgccatctga tccaggtaag | 1620 |
| ccaattatca tgattggtcc aggtactggt gttgctccat tcagaggttt tgttcaagaa | 1680 |
| agagctaagc aagctagaga tggtgttgaa gttggtaaaa ccttgttgtt cttcggttgt | 1740 |
| agaaagtcca ctgaagattt catgtaccaa aaagaatggc aagaatacaa agaagcctta | 1800 |
| ggtgacaagt tcgaaatgat tactgccttc tcaagagaag gttctaagaa ggtttacgtc | 1860 |
| caacacagat tgaaagaaag atccaaagaa gtctccgatt tgttgtctca aaaggcctac | 1920 |
| ttttacgttt gtggtgatgc tgctcatatg gccagagaag ttaatactgt tttggcccaa | 1980 |
| attatcgctg aaggtagagg tgtatctgaa gctaagggtg aagaaatcgt taagaacatg | 2040 |
| agatccgcca atcaatacca agaagatgtt tggtcctaa | 2079 |

SEQ ID NO: 192

| | |
|---|---|
| MAELDTLDIV VLGVIFLGTV AYFTKGKLWG VTKDPYANGF AAGGASKPGR TRNIVEAMEE | 60 |
| SGKNCVVFYG SQTGTAEDYA SRLAKEGKSR FGLNTMIADL EDYDFDNLDT VPSDNIVMFV | 120 |
| LATYGEGEPT DNAVDFYEFI TGEDASFNEG NDPPLGNLNY VAFGLGNNTY EHYNSMVRNV | 180 |
| NKALEKLGAH RIGEAGEGDD GAGTMEEDFL AWKDPMWEAL AKKMGLEERE AVYEPIFAIN | 240 |
| ERDDLTPEAN EVYLGEPNKL HLEGTAKGPF NSHNPYIAPI AESYELFSAK DRNCLHMEID | 300 |
| ISGSNLKYET GDHIAIWPTN PGEEVNKFLD ILDLSGKQHS VVTVKALEPT AKVPFPNPTT | 360 |
| YDAILRYHLE ICAPVSRQFV STLAAFAPND DIKAEMNRLG SDKDYFHEKT GPHYYNIARF | 420 |
| LASVSKGEKW TKIPFSAFIE GLTKLQPRYY SISSSSLVQP KKISITAVVE SQQIPGRDDP | 480 |
| FRGVATNYLF ALKQKQNGDP NPAPFGQSYE LTGPRNKYDG IHVPVHVRHS NFKLPSDPGK | 540 |
| PIIMIGPGTG VAPFRGFVQE RAKQARDGVE VGKTLLFFGC RKSTEDFMYQ KEWQEYKEAL | 600 |
| GDKFEMITAF SREGSKKVYV QHRLKERSKE VSDLLSQKAY FYVCGDAAHM AREVNTVLAQ | 660 |
| IIAEGRGVSE AKGEEIVKNM RSANQYQEDV WS | 692 |

SEQ ID NO: 193

| | |
|---|---|
| atggcagaat tagatacact tgatatagta gtattaggtg ttatcttttt gggtactgtg | 60 |
| gcatacttta ctaagggtaa attgtggggt gttaccaagg atccatacgc taacggattc | 120 |
| gctgcaggtg gtgcttccaa gcctggcaga actagaaaca tcgtcgaagc tatggaggaa | 180 |
| tcaggtaaaa actgtgttgt tttctacggc agtcaaacag gtacagcgga ggattacgca | 240 |
| tcaagacttg caaaggaagg aaagtccaga ttcggtttga acactatgat cgccgatcta | 300 |
| gaagattatg acttcgataa cttagacact gttccatctg ataacatcgt tatgtttgta | 360 |
| ttggctactt acggtgaagg cgaaccaaca gataacgccg tggatttcta tgagttcatt | 420 |
| actggcgaag atgcctcttt caatgagggc aacgatcctc cactaggtaa cttgaattac | 480 |
| gttgcgttcg gtctgggcaa caatacctac gaacactaca actcaatggt caggaacgtt | 540 |
| aacaaggctc tagaaaagtt aggagctcat agaattggag aagcaggtga gggtgacgac | 600 |
| ggagctggaa ctatggaaga ggacttttta gcttggaaag atccaatgtg ggaagccttg | 660 |
| gctaaaaaga tgggcttgga ggaaagagaa gctgtatatg aacctatttt cgctatcaat | 720 |
| gagagagatg atttgacccc tgaagcgaat gaggtatact tgggagaacc taataagcta | 780 |
| cacttggaag gtacagcgaa aggtccattc aactcccaca acccatatat cgcaccaatt | 840 |
| gcagaatcat acgaactttt ctcagctaag gatagaaatt gtctgcatat ggaaattgat | 900 |
| atttctggta gtaatctaaa gtatgaaaca ggcgaccata tcgcgatctg gcctaccaac | 960 |
| ccaggtgaag aggtcaacaa atttcttgac attctagatc tgtctggtaa gcaacattcc | 1020 |
| gtcgtaacag tgaaagcctt agaacctaca gccaaagttc cttttccaaa tccaactacc | 1080 |
| tacgatgcta tattgagata ccatctggaa atatgcgctc cagtttctag acagtttgtc | 1140 |
| tcaactttag cagcattcgc ccctaatgat gatatcaaag ctgagatgaa ccgtttggga | 1200 |
| tcagacaaag attacttcca cgaaaagaca ggaccacatt actacaatat cgctagattt | 1260 |
| ttggcctcag tctctaaagg tgaaaaatgg acaaagatac cattttctgc tttcatagaa | 1320 |
| ggccttacaa aactacaacc aagatactat tctatctctt cctctagttt agttcagcct | 1380 |
| aaaaagatta gtattactgc tgttgtcgaa tctcagcaaa ttccaggtag agatgaccca | 1440 |
| ttcagaggtg tagcgactaa ctacttgttc gctttgaagc agaaacaaaa cggtgatcca | 1500 |
| aatccagctc cttttggcca atcatacgag ttgacaggac caaggaataa gtatgatggt | 1560 |
| atacatgttc cagtccatgt aagacattct aactttaagc taccatctga tccaggcaaa | 1620 |
| cctattatca tgatcggtcc aggtaccggt gttgcccctt ttagaggctt cgtccaagag | 1680 |
| agggcaaaac aagccagaga tggtgtagaa gttggtaaaa cactgctgtt ctttggatgt | 1740 |
| agaaagagta cagaagattt catgtatcaa aaagagtggc aagagtacaa ggaagctctt | 1800 |
| ggcgacaaat tcgaaatgat tacagctttt tcaagagaag gatctaaaaa ggtttatgtt | 1860 |
| caacacagac tgaaggaaag atcaaaggaa gtttctgatc ttctatccca aaaagcatac | 1920 |
| ttctacgttt gcggagacgc cgcacatatg gcacgtgaag tgaacactgt gttagcacag | 1980 |
| atcatagcag aaggccgtgg tgtatcagaa gccaagggtg aggaaattgt caaaaacatg | 2040 |
| agatcagcaa atcaatacca agaggatgtc tggagttaa | 2079 |

SEQ ID NO: 194

| | |
|---|---|
| MAELDTLDIV VLGVIFLGTV AYFTKGKLWG VTKDPYANGF AAGGASKPGR TRNIVEAMEE | 60 |
| SGKNCVVFYG SQTGTAEDYA SRLAKEGKSR FGLNTMIADL EDYDFDNLDT VPSDNIVMFV | 120 |
| LATYGEGEPT DNAVDFYEFI TGEDASFNEG NDPPLGNLNY VAFGLGNNTY EHYNSMVRNV | 180 |
| NKALEKLGAH RIGEAGEGDD GAGTMEEDFL AWKDPMWEAL AKKMGLEERE AVYEPIFAIN | 240 |
| ERDDLTPEAN EVYLGEPNKL HLEGTAKGPF NSHNPYIAPI AESYELFSAK DRNCLHMEID | 300 |
| ISGSNLKYET GDHIAIWPTN PGEEVNKFLD ILDLSGKQHS VVTVKALEPT AKVPFPNPTT | 360 |
| YDAILRYHLE ICAPVSRQFV STLAAFAPND DIKAEMNRLG SDKDYFHEKT GPHYYNIARF | 420 |
| LASVSKGEKW TKIPFSAFIE GLTKLQPRYY SISSSSLVQP KKISITAVVE SQQIPGRDDP | 480 |
| FRGVATNYLF ALKQKQNGDP NPAPFGQSYE LTGPRNKYDG IHVPVHVRHS NFKLPSDPGK | 540 |
| PIIMIGPGTG VAPFRGFVQE RAKQARDGVE VGKTLLFFGC RKSTEDFMYQ KEWQEYKEAL | 600 |
| GDKFEMITAF SREGSKKVYV QHRLKERSKE VSDLLSQKAY FYVCGDAAHM AREVNTVLAQ | 660 |
| IIAEGRGVSE AKGEEIVKNM RSANQYQEDV WS | 692 |

SEQ ID NO: 195

| | |
|---|---|
| atggcttcag aaaaagaaat taggagagag agattcttga acgttttccc taaattagta | 60 |
| gaggaattga acgcatcgct tttggcttac ggtatgccta aggaagcatg tgactggtat | 120 |
| gcccactcat tgaactacaa cactccaggc ggtaagctaa atagaggttt gtccgttgtg | 180 |
| gacacgtatg ctattctctc caacaagacc gttgaacaat tggggcaaga agaatacgaa | 240 |
| aaggttgcca ttctaggttg gtgcattgag ttgttgcagg cttacttctt ggtcgccgat | 300 |
| gatatgatgg acaagtccat taccagaaga ggccaaccat gttggtacaa ggttcctgaa | 360 |
| gttggggaaa ttgccatcaa tgacgcattc atgttagagg ctgctatcta caagcttttg | 420 |
| aaatctcact tcagaaacga aaaatactac atagatatca ccgaattgtt ccatgaggtc | 480 |
| accttccaaa ccgaattggg ccaattgatg gacttaatca ctgcacctga agacaaagtc | 540 |
| gacttgagta agttctccct aaagaagcac tccttcatag ttactttcaa gactgcttac | 600 |
| tattctttct acttgcctgt cgcattggcc atgtacgttg ccggtatcac ggatgaaaag | 660 |
| gatttgaaac aagccagaga tgtcttgatt ccattgggtg aatacttcca aattcaagat | 720 |
| gactacttag actgcttcgg taccccagaa cagatcggta agatcggtac agatatccaa | 780 |
| gataacaaat gttcttgggt aatcaacaag gcattggaac ttgcttccgc agaacaaaga | 840 |
| aagactttag acgaaaatta cggtaagaag gactcagtcg cagaagccaa atgcaaaaag | 900 |
| attttcaatg acttgaaaat tgaacagcta taccacgaat atgaagagtc tattgccaag | 960 |
| gatttgaagg ccaaaatttc tcaggtcgat gagtctcgtg gcttcaaagc tgatgtctta | 1020 |
| actgcgttct tgaacaaagt ttacaagaga agcaaaggtt ctagtactgg ttcatctaca | 1080 |
| tctactggag gtatggtcgc acaaactttc aacctggata cctacttatc ccaaagacaa | 1140 |
| caacaagttg aagaggccct aagtgctgct cttgtgccag cttatcctga gagaatatac | 1200 |
| gaagctatga gatactccct cctggcaggt ggcaaaagat taagacctat cttatgttta | 1260 |
| gctgcttgcg aattggcagg tggttctgtt gaacaagcca tgccaactgc gtgtgcactt | 1320 |
| gaaatgatcc atacaatgtc actaattcat gatgacctgc cagccatgga taacgatgat | 1380 |
| ttcagaagag gaaagccaac taatcacaag gtgttcgggg aagatatagc catcttagcg | 1440 |
| ggtgatgcgc ttttagctta cgcttttgaa catattgctt ctcaaacaag aggagtacca | 1500 |
| cctcaattgg tgctacaagt tattgctaga atcggacacg ccgttgctgc aacaggcctc | 1560 |
| gttggaggcc aagtcgtaga ccttgaatct gaaggtaaag ctatttcctt agaaacattg | 1620 |
| gagtatattc actcacataa gactggagcc ttgctggaag catcagttgt ctcaggcggt | 1680 |
| attctcgcag gggcagatga agagcttttg gccagattgt ctcattacgc tagagatata | 1740 |
| ggcttggctt ttcaaatcgt cgatgatatc ctggatgtta ctgctacatc tgaacagttg | 1800 |
| gggaaaaccg ctggtaaaga ccaggcagcc gcaaaggcaa cttatccaag tctattgggt | 1860 |
| ttagaagcct ctagacagaa agcggaagag ttgattcaat ctgctaagga agccttaaga | 1920 |
| ccttacggtt cacaagcaga gccactccta gcgctggcag acttcatcac acgtcgtcag | 1980 |
| cattaa | 1986 |

SEQ ID NO: 196

| | |
|---|---|
| MASEKEIRRE RFLNVFPKLV EELNASLLAY GMPKEACDWY AHSLNYNTPG GKLNRGLSVV | 60 |
| DTYAILSNKT VEQLGQEEYE KVAILGWCIE LLQAYFLVAD DMMDKSITRR GQPCWYKVPE | 120 |
| VGEIAINDAF MLEAAIYKLL KSHFRNEKYY IDITELFHEV TFQTELGQLM DLITAPEDKV | 180 |
| DLSKFSLKKH SFIVTFKTAY YSFYLPVALA MYVAGITDEK DLKQARDVLI PLGEYFQIQD | 240 |
| DYLDCFGTPE QIGKIGTDIQ DNKCSWVINK ALELASAEQR KTLDENYGKK DSVAEAKCKK | 300 |
| IFNDLKIEQL YHEYEESIAK DLKAKISQVD ESRGFKADVL TAFLNKVYKR SKGSSTGSST | 360 |
| STGGMVAQTF NLDTYLSQRQ QQVEEALSAA LVPAYPERIY EAMRYSLLAG GKRLRPILCL | 420 |
| AACELAGGSV EQAMPTACAL EMIHTMSLIH DDLPAMDNDD FRRGKPTNHK VFGEDIAILA | 480 |
| GDALLAYAFE HIASQTRGVP PQLVLQVIAR IGHAVAATGL VGGQVVDLES EGKAISLETL | 540 |
| EYIHSHKTGA LLEASVVSGG ILAGADEELL ARLSHYARDI GLAFQIVDDI LDVTATSEQL | 600 |
| GKTAGKDQAA AKATYPSLLG LEASRQKAEE LIQSAKEALR PYGSQAEPLL ALADFITRRQ | 660 |
| H | 661 |

SEQ ID NO: 197

| | |
|---|---|
| atgccaaaga ttGttatttt gcctcatcag gatctctgcc ctgatggcgc tgttctggaa | 60 |
| gctaatagcg gtgaaaccat tctcgacgca gctctgcgta acggtatcga gattgaacac | 120 |
| gcctgtgaaa aatcctgtgc ttgcaccacc tgccactgca tcgttcgtga aggttttgac | 180 |
| tcactgccgg aaagctcaga gcaggaagac gacatgctgg acaaagcctg gggactggag | 240 |
| ccggaaagcc gtttaagctg ccaggcgcgc gttaccgacg aagatttagt agtcgaaatc | 300 |
| ccgcgttaca ctatcaacca tgcgcgtgag cattaa | 336 |

SEQ ID NO: 198

| | |
|---|---|
| MPKIVILPHQ DLCPDGAVLE ANSGETILDA ALRNGIEIEH ACEKSCACTT CHCIVREGFD | 60 |
| SLPESSEQED DMLDKAWGLE PESRLSCQAR VTDEDLVVEI PRYTINHARE H | 111 |

SEQ ID NO: 199

| | |
|---|---|
| atggctgatt gggtaacagg caaagtcact aaagtgcaga actggaccga cgccctgttt | 60 |
| agtctcaccg ttcacgcccc cgtgcttccg tttaccgccg ggcaatttac caagcttggc | 120 |
| cttgaaatcg acggcgaacg cgtccagcgc gcctactcct atgtaaactc gcccgataat | 180 |
| cccgatctgg agttttacct ggtcaccgtc cccgatggca aattaagccc acgactggcg | 240 |
| gcactgaaac caggcgatga agtgcaggtg gttagcgaag cggcaggatt ctttgtgctc | 300 |
| gatgaagtgc cgcactgcga aacgctatgg atgctggcaa ccggtacagc gattggccct | 360 |
| tatttatcga ttctgcaact aggtaaagat ttagatcgct tcaaaaatct ggtcctggtg | 420 |
| cacgccgcac gttatgccgc cgacttaagc tatttgccac tgatgcagga actggaaaaa | 480 |
| cgctacgaag gaaaactgcg cattcagacg gtggtcagtc gggaaacggc agcggggtcg | 540 |
| ctcaccggac ggataccggc attaattgaa agtggggaac tggaaagcac gattggcctg | 600 |
| ccgatgaata aagaaaccag ccatgtgatg ctgtgcggca atccacagat ggtgcgcgat | 660 |
| acacaacagt tgctgaaaga gacccggcag atgacgaaac atttacgtcg ccgaccgggc | 720 |
| catatgacag cggagcatta ctggtaa | 747 |

SEQ ID NO: 200

| | |
|---|---|
| MADWVIGKVT KVQNWTDALF SLTVHAPVLP FTAGQFTKLG LEIDGERVQR AYSYVNSPDN | 60 |
| PDLEFYLVTV PDGKLSPRLA ALKPGDEVQV VSEAAGFFVL DEVPHCETLW MLATGTAIGP | 120 |
| YLSILQLGKD LDRFKNLVLV HAARYAADLS YLPLMQELEK RYEGKLRIQT VVSRETAAGS | 180 |
| LTGRIPALIE SGELESTIGL PMNKETSHVM LCGNPQMVRD TQQLLKETRQ MTKHLRRRPG | 240 |
| HMTAEHYW | 248 |

SEQ ID NO: 201

| | |
|---|---|
| atgtccttcc cagatgaaca aaaggttgat ttccaaacct tccagaacgt tatcaacaat | 60 |
| caattgtctc caacctccga atccagacat ggtatttgtc catctactga agaatccttg | 120 |
| tgggaatctc cagtttctac tcaagatgat gttgatagag ctgtttctgc tgctaaagct | 180 |
| gcttatccag cttggagaaa attgtcttgg gacgaaagag cttcttactt ggttaagttt | 240 |
| gctgatgcta ttgaagccca caagcaagaa ttcattgatt tgttgggtag agaagctggt | 300 |
| aaaccaccac aagctggtgg ttttgaattg atgttggtta tggaacacgt tagggaaact | 360 |
| ccaaagttga gaattggtga agttaagcca gaagataacg aagatagaac cgctgttgtt | 420 |
| agatacgttc caattggtgt tggtgttggt atagttccat ggaattttcc aatgttgttg | 480 |
| ggtattggta aagcttaccc agctatgttg gctggtaata cttttatttg gaagccatct | 540 |
| ccatacaccc catactctgc tttgaaattg gctgaaattg gtgctaaagt tttgccacca | 600 |
| ggtgttttac aagctttgtc tggtggtgat gatttgggtc caatgttgac tgctcatcca | 660 |
| gatgttgcca aagtttcttt tactggttct actgaaaccg gtaaaaagat tatggctgct | 720 |
| tgtgctgcta ctttgaagag agttactttg gaattgggtg gtaatgatgc tgctatcgtt | 780 |
| tgtgaagatg ttgatattcc aggtgttgct ggtaaggttg cttttttggc ttatgttcat | 840 |
| tctggtcaga tctgcatgaa catcaagaga atctacgttc acgaatccat ctacgacaag | 900 |
| ttcgtttccg aagttatcaa gttcttgcat gctttgaaaa ccggtgattt ctctgatcca | 960 |
| gaagcttttt ttggtccaat ccaaaacaag atgcagtacg aaaaattgca gaggttgtac | 1020 |
| gaacaaatcg ataagcaagg ttggaagtgt gcttttggtt ctgcttctcc agctacttct | 1080 |
| gaaaaaggtt attttgttcc accagtcttg gttgataatc caccagaaga ttctgaaatc | 1140 |
| gtccaaatgg aaccatttgg tccaatagtt ccagttatga agtggcaatc tgaagatgat | 1200 |
| gttattgcta gagctaacgc ttctgattat ggtttgggtg cttctgtttg gtctaaagat | 1260 |
| gttgctagag caagaagaat ggctgaatta ttggaagctg gttctgtttg ggttaacacc | 1320 |
| cattttgaag ttgctccaaa tgttcctttt ggtggtcata agcaatctgg tattggtatg | 1380 |
| gattggggtg aagttggttt gaaaggttgg tgtaatccac aagcttattg ggtcaaacat | 1440 |
| tccggttaa | 1449 |

SEQ ID NO: 202

| | |
|---|---|
| MSFPDEQKVD FQTFQNVINN QLSPTSESRH GICPSTEESL WESPVSTQDD VDRAVSAAKA | 60 |
| AYPAWRKLSW DERASYLVKF ADAIEAHKQE FIDLLGREAG KPPQAGGFEL MLVMEHVRET | 120 |
| PKLRIGEVKP EDNEDRTAVV RYVPIGVGVG IVPWNFPMLL GIGKAYPAML AGNTFIWKPS | 180 |
| PYTPYSALKL AEIGAKVLPP GVLQALSGGD DLGPMLTAHP DVAKVSFTGS TETGKKIMAA | 240 |
| CAATLKRVIL ELGGNDAAIV CEDVDIPGVA GKVAFLAYVH SGQICMNIKR IYVHESIYDK | 300 |
| FVSEVIKFLH ALKTGDFSDP EAFFGPIQNK MQYEKLQRLY EQIDKQGWKC AFGSASPATS | 360 |
| EKGYFVPPVL VDNPPEDSEI VQMEPFGPIV PVMKWQSEDD VIARANASDY GLGASVWSKD | 420 |
| VARARRMAEL LEAGSVWVNT HFEVAPNVPF GGHKQSGIGM DWGEVGLKGW CNPQAYWVKH | 480 |
| SG | 482 |

SEQ ID NO: 205

| | |
|---|---|
| atgtggtggc tgtttcgtgc cttgttttca tcaattttcc tgctttcaat cgttttaagt | 60 |
| attcctgttg cttttgatgt tggtgggaga gattcaggac ttgcctatag tttagctttg | 120 |
| ttcttattct acttcatcta ctctagttta gaacttctta cgcctgaaaa gtccagaagt | 180 |
| cgttatttct tatctggctt cttaagattg agccaatgga ttatcatacc tgcactatta | 240 |
| atttgggcgt taggtcagtt cgcggttgac gcagataaca ccaattgggt tgaacgtacc | 300 |
| gttggaggtc tgttcaattc caaatccacc tcttggagag aatggatgtt tggcaaggat | 360 |
| ggactggtgg aaactatcac tttaggcggc tgggataact tgttacgtta ttctggtcca | 420 |
| gtgttccaat tattagaggg attttgtaca cttcttgtaa tccaagctgc cggacaatta | 480 |
| accagatggc ttgtaaatag aggtcgttca gatacatggc taattgtatt gttagtgtta | 540 |
| agctcaagta tcatggcatc agctgtgtat tttctttggc gtgttgcaca gtttccccag | 600 |
| atcgggaatc tagacgcaac gttaataggt attgcgatga caaccgcagt atttttgtgt | 660 |
| gcgttcggca tcggttctgg caggggtaat cccattgaat catcattgtt gttcgcttac | 720 |
| attgtcttgt gtatttacca aatttttaca gactatctac catcagaaaa tgcagaccac | 780 |
| acgcaagatc atgatggctc agaaagcgat atccctcctc ttcctcctgt tatcatggct | 840 |
| agctacagca cgttccttca tatgttgggc tctttgccct ctgccgttca ttcatcattg | 900 |
| gcacttttgt atgctgcctt ccagactata actccatccg taattatttc actaacctat | 960 |
| aggagtcttg ttttttactg cgccactagg attataccta gcattagaga aagtggtgca | 1020 |
| caggctatga tgcaagaacc agactgggaa gatagcgaaa cagcttctaa atttttgggc | 1080 |
| tttttgagct ggttttcccc ctctatcttg atagctgtgt atacctcctt attacttcaa | 1140 |
| catttttcta cgagtgatgg tcctgatggt tggacgttga gaggcggaga tgttgagggt | 1200 |
| tctaattggc aatgggccaa cataggtctt accatggttt tgtacggagt cgaactgtac | 1260 |
| ctgggctctg atgagcatga tcattggaag gtggattaa | 1299 |

SEQ ID NO: 206

| | |
|---|---|
| MWWLFRALFS SIFLLSIVLS IPVAFDVGGR DSGLAYSLAL FLFYFIYSSL ELLTPEKSRS | 60 |
| RYFLSGFLRL SQWIIIPALL IWALGQFAVD ADNTNWVERT VGGLFNSKST SWREWMFGKD | 120 |
| GLVETITLGG WDNLLRYSGP VFQLLEGFCT LLVIQAAGQL TRWLVNRGRS DTWLIVLLVL | 180 |
| SSSIMASAVY FLWRVAQFPQ IGNLDATLIG IAMITAVELC AFGIGSGRGN PIESSLLFAY | 240 |
| IVLCIYQIFT DYLPSENADH TQDHDGSESD IPPLPPVIMA SYSTFLHMLG SLPSAVHSSL | 300 |
| ALLYAAFQTI TPSVIISLTY RSLVFYCATR IIPSIRESGA QAMMQEPDWE DSETASKFLG | 360 |
| FLSWFSPSIL IAVYTSLLLQ HFSTSDGPDG WTLRGGDVEG SNWQWANIGL TMVLYGVELY | 420 |
| LGSDEHDHWK VD | 432 |

SEQ ID NO: 207

| | |
|---|---|
| atggctgatt ctacattagc tgctaacggt aacagtttat tggaaactac aaaaacaaat | 60 |
| gcggcagctg cctaccaaag cgttgcgaac ggacccgttg cacagaatgt atacgatcac | 120 |
| acgcaaaagg catccaatga gttgtctaat ctagcagctg caaggagaac tccggctaat | 180 |
| ccagccgcta caggtcaacc attgacgcat tatcattctt ttttcagtga attactgagt | 240 |
| tggaataacc caagagcttc tgccatagct tacgttacaa ttattggtgc catttttacg | 300 |
| gctagatatc ttgatttgtt gagatgggga ttgaaagttt cttggatggt tttgggtgtt | 360 |
| actattcttg ccgaggtatt gggcaaggta attctaaaca atggactggc cacccaagtc | 420 |
| agacctagga ggtattatac agtacctaga gaaacactag atgctctaat cggcgatgtt | 480 |
| catgaactaa ttaatttttt cgtcatcgaa gcacaacgta tcatttttgc agaaaacgtc | 540 |
| tttgcaagtg cggctgcctt tattgctgct tttatatctt attttttggt gaaattagtt | 600 |
| ccctactggg gactagcagt tattggtacc actgttgcct tcgttgtccc attaatatac | 660 |
| acctcaaatc aagaattgat cgacgaacaa ctacaccatg ctagtgaact aataaatagc | 720 |
| caaacagcgc aaatacaatc cgttgcatct aaacaaatgg aacaagtttc caatatctcc | 780 |
| aaacaatatg caggagatta tagtggtaaa gtgcaagacc tgttaagagg aaagacgcct | 840 |
| agcaggcaga agatagacaa gcccgagcaa ccaattagcg ctaaacaacc ccaattcccc | 900 |
| agtccaccaa ccgaggatcc ggtgacagca acggaagctc ctcaaatacc tacccccgct | 960 |
| gcgcttaagg aagagcttaa tgctccaacc gcaatcgata ctgctgcacc tgaattaccc | 1020 |
| catgaggatg ttgtgccctc aaaagaacct atgttagcct cctaa | 1065 |

SEQ ID NO: 208

| | |
|---|---|
| MADSTLAANG NSLLETTKTN AAAAYQSVAN GPVAQNVYDH TQKASNELSN LAAARRTPAN | 60 |
| PAATGQPLTH YHSFFSELLS WNNPRASAIA YVTIIGAIFT ARYLDLLRWG LKVSWMVLGV | 120 |
| TILAEVLGKV ILNNGLATQV RPRRYYTVPR ETLDALIGDV HELINFFVIE AQRIIFAENV | 180 |
| FASAAAFIAA FISYFLVKLV PYWGLAVIGT TVAFVVPLIY TSNQELIDEQ LHHASELINS | 240 |
| QTAQIQSVAS KQMEQVSNIS KQYAGDYSGK VQDLLRGKTP SRQKIDKPEQ PISAKQPQFP | 300 |
| SPPTEDPVTA TEAPQIPTPA ALKEELNAPT AIDTAAPELP HEDVVPSKEP MLAS | 354 |

SEQ ID NO: 209

| | |
|---|---|
| MTERELHADV RRFYQHTSQT LTGLRPYPTE REVQDAAAAW QQKDNIENAI REAVRKGSPD | 60 |
| SGGITDIVIP LSAAEKRALI NEIDHSFSEN GMWMVIFTVS LSAFLQGFVQ SSQNGANLFA | 120 |
| DQWLKSQKHT VNSQFAYANA AVYFSAAVIG CPLAAPMSSL FGRRGVIIVA SFLIFAASVG | 180 |
| SACITLNDNA WLSLRSIRLI GGVGMGLKAT STPILAAETA VGSWRGSSVL LWQLWVSFGI | 240 |
| MMSFIVNICL NQIDDKNLKL RLILASPAVF ALMLMYTVAK CPESFRYYLM PGSRKYSPEK | 300 |
| AYASLLRLRN TKVGHNTSTH PFWLTPSFPF TICTVEQHLI QAVTATSSQR LVLDAAPKPR | 360 |
| TLVVGAVSHY VRQYWKILKV HRLRNAAITT GIVALSQQLS GINLMAFYGG TTLVGISPGN | 420 |
| QPTEDQISKA MLYNLIFGLS NFLFCLPAIH SIDVLGRRRV LLFTIPGMAL TLMAAAISFN | 480 |
| TANEDVRNGL VAFWIYFHTV FYSPGMGPVP FVLASESFPL AFRDTGASLA ISINLLFAGL | 540 |
| LAWLQPLLVT GIRFGGILGV FAGLNVVAFA LIFLLMEETS GVPLESLGSV FDQSKKDLIH | 600 |
| FQLFKFLPWF GRFILGRSSL AERPERTVDL SPSSVTAASV TDDDDEERIW NSDTVSSGVR | 660 |
| LADMLGGNGR G | 671 |

SEQ ID NO: 210

| | |
|---|---|
| MSSPLDAAGL AIATTELCRN LATGLYFIIR EIRDASKDAE IMQDTLAALH TRLDQVRALF | 60 |
| DANVPQSPLE KDYRNSIDRT LENIHRDLSL LTSKLHIDVI LEAKGSKRLE AWYVLQRKFQ | 120 |
| SDDIRNIKQR LAGSEELLQS HFEMLSIYIS YRIRDEVIDF KAFVRPILEK LLFHATLTEE | 180 |
| RQRYQAAESR SIKRLQHVTN ALGTGNTFPG EESDFEYHDA FKTWKDKSEA MIMSIADPPW | 240 |
| HQVSNSNYVP SIRNESRDGA SILPTVRDFR EKNGMYPSLR VTPNLSHVEE ILDESLHQDV | 300 |
| TEDLINWCKE QGFPVNVSNF RYDLIWEAAP VALKGTSPMH QAIKTNNMVV LEKMLSRDCN | 360 |
| IEVRLEDGSQ DPTPLLLAGS ELNAVAVKLL LTKGAKADAT DRIGKTGLHL CQSPKFEGRR | 420 |
| VAKLLLGDSR AEALDVNAQD QFGMTAAHIA ARVGDVKMLE YLLLDQYGKK VADANAQQQD | 480 |
| GSTPLMVALK SNIANKKQVI DVLSRCSDLS IKNKNGEDAK EVAAKHSPKD VRKYLLAHLD | 540 |
| QDSTRSRRIS ESTIVVSGIS VQMREESCSG CRRHCPQFTD CKLSIGDSAF SQDWKRSLRK | 600 |
| YSSDQSSIAM GSSSSIRQAR | 620 |

SEQ ID NO: 211

| | |
|---|---|
| MSGRESIAAA PLPEPEPYSV FDKRQTALIV TIVSIAATFS GFASNIYFPA LPTIAKDLNV | 60 |
| SIELINLTVT SYLIFQGLAP SLWGPISDVK GRRVAYLLTF IVFLGACIGL AEAKNYATMV | 120 |
| VLRCVQSTGS ASTIAIGSGV IGDITTRDNR GGLMGIFQAG LLVPVAVGPI IGGALAGSLG | 180 |
| WRSIFWFLTI YSGVFLIFLV LLLPETLRSI VGNGSREPKH VMAKYPLRVY QKTTKVKWIH | 240 |
| DATSPSPTEK KRIDITGPFR ILISKQAAPI IVFLAVYYAV WQMSITAMSS LFKDKYGLTE | 300 |
| TEIGLTFIAN GVGSMVGTLI TGKILNMDYR RFKARHDARI ASGSKENDVE TVNTRKNQEN | 360 |
| DFPLETARLR LVPVFSLLQC ASILLFGWTI QYPKQVHIAV PIISTFITGW SAVSMQSVVM | 420 |
| TYLVDVFHDR SAAASASLNL ARCLFAAGGT SFVMPLINSI GVGLAFTVCV VVQGVALVSL | 480 |
| AVQWKLGAKW RREAEDARSE P | 501 |

SEQ ID NO: 212

| | |
|---|---|
| atgttacgtt catctcctcc accaagcctg cccagagacg ccccaagcac tgtttttaaa | 60 |
| acttatacac cacacacgtt gttaccattt aacggagaag aggaccgtcc tgtttttctg | 120 |
| gccgttagag gcagagtctt tgatgtgtcc cctggcagaa atttttatgg tccaggaggt | 180 |
| ccctactcta attttgctgg tcgtgatgca tctagagggt tagcctgtgg tagcttcgat | 240 |
| gaagatatgt tgaccaagga tctagatggc ccactagata aactagaagg tttagacgcg | 300 |
| gaacaaatgg aagctttaca aggatgggag gaaagatttc tggaaaaata caatgtcgtg | 360 |
| ggtaaacttg tttctgttca ggattatgaa tctcagaagg cttaa | 405 |

SEQ ID NO: 213

| | |
|---|---|
| MLRSSPPPSL PRDAPSTVFK TYTPHTLLPF NGEEDRPVFL AVRGRVFDVS PGRNFYGPGG | 60 |
| PYSNFAGRDA SRGLACGSFD EDMLTKDLDG PLDKLEGLDA EQMEALQGWE ERFLEKYNVV | 120 |
| GKLVSVQDYE SQKA | 134 |

SEQ ID NO: 214

| | |
|---|---|
| atggagcatg ttgaacaaca catggctcaa caagcttccc aagaaacagc gtcattgttc | 60 |
| acaccattaa acttaatttt gctgtctgct gttttataca ccacttattc catgttacgt | 120 |
| tcatctcctc caccaagcct gcccagagac gccccaagca ctgtttttaa aacttataca | 180 |
| ccacacacgt tgttaccatt taacggagaa gaggaccgtc ctgtttttct ggccgttaga | 240 |
| ggcagagtct ttgatgtgtc ccctggcaga aatttttatg gtccaggagg tccctactct | 300 |
| aattttgctg gtcgtgatgc atctagaggg ttagcctgtg gtagcttcga tgaagatatg | 360 |
| ttgaccaagg atctagatgg cccactagat aaactagaag gtttagacgc ggaacaaatg | 420 |
| gaagctttac aaggatggga ggaaagattt ctggaaaaat acaatgtcgt gggtaaactt | 480 |
| gtttctgttc aggattatga atctcagaag gcttaa | 516 |

SEQ ID NO: 215

| | |
|---|---|
| MEHVEQHMAQ QASQETASLF TPLNLILLSA VLYTTYSMLR SSPPPSLPRD APSTVFKTYT | 60 |
| PHTLLPFNGE EDRPVFLAVR GRVFDVSPGR NFYGPGGPYS NFAGRDASRG LACGSFDEDM | 120 |
| LTKDLDGPLD KLEGLDAEQM EALQGWEERF LEKYNVVGKL VSVQDYESQK A | 171 |

SEQ ID NO: 216

| | |
|---|---|
| atggctggca agttcgaacc caaagtgccc gttaatttgg acccacctaa agatgacata | 60 |
| atctcaaggg aagagttagc aaaggcaaac ggtgctgatg ggaataagtg ttatgttgca | 120 |
| attaaaggca aggtgtatga cgtaaccggc aacaaagcct acttgccagg cgcaagctat | 180 |
| aatgtgtttg ctggcaaaga tgcctcaaga gctttgggta aaaccagcac caaacctgag | 240 |
| gatgctaggc ctgaatggca agacttagat gagaaagaaa agggtgtctt aaacgactgg | 300 |
| attactttct ttagcaaaag atacaatgtt gtgggggttg tggaaggcgc aacaaacatg | 360 |
| gattag | 366 |

SEQ ID NO: 217

| | |
|---|---|
| MAGKFEPKVP VNLDPPKDDI ISREELAKAN GADGNKCYVA IKGKVYDVTG NKAYLPGASY | 60 |
| NVFAGKDASR ALGKTSTKPE DARPEWQDLD EKEKGVLNDW ITFFSKRYNV VGVVEGATNM | 120 |
| D | 121 |

SEQ ID NO: 218

| | |
|---|---|
| atggctgacg aatcaacact tcgtcaaaga aaaccgcaac cgaagaacga aaccgaaagt | 60 |
| gaagtttctc gtcctagcac acctactaaa aaatcaaaaa agagatcatc cgcaaaagtt | 120 |
| gacgaggaag atccatggga tggttattcc ccatacttag atgtggtgag agtaattagc | 180 |
| tttattattg ttgcatctat gggattgagc tatgtcattt caggtggcga gtcattctgg | 240 |
| tggggtcata aaaacaagcc gaattggatg acacaacgtt tctacaaaga tttgatatta | 300 |
| ggacccccac ctccagtgta catgactttg gaggaacttt ctttacatga cggtactgat | 360 |
| cctgacagac cgcttttact tgcgatcaac ggtacaattt atgacgtgtc aaatggtagg | 420 |
| agaatgtacg gcccaggtgg ttcctattct tactttgcag ctacggatgc tgcaagggga | 480 |
| ttcgtcaccg gctgttttgc tgaagatcaa actgcagact tgagaggtta tgaagaaact | 540 |
| tttcttccac tggacgatcc agaagttgac agtcactgga ctcccgaagc tctggcagaa | 600 |
| ctgaagatca aagagcgtga agaagctaaa aaaagggctg atgctgcttt acaacactgg | 660 |
| gttgattttt ttgcaaattc caaaaaatac accaaagtcg gttatgttta tagagagccg | 720 |
| gggtggcttg aaaaagagaa accaaagaaa ttatgcgatc aggcccaaag atcaagaaag | 780 |
| accagaaaaa ttccaaaaaa ggattaa | 807 |

SEQ ID NO: 219

| | |
|---|---|
| MADESTLRQR KPQPKNETES EVSRPSTPTK KSKKRSSAKV DEEDPWDGYS PYLDVVRVIS | 60 |
| FIIVASMGLS YVISGGESFW WGHKNKPNWM TQRFYKDLIL GPPPPVYMTL EELSLHDGTD | 120 |
| PDRPLLLAIN GTIYDVSNGR RMYGPGGSYS YFAATDAARG FVTGCFAEDQ TADLRGYEET | 180 |
| FLPLDDPEVD SHWTPEALAE LKIKEREEAK KRADAALQHW VDFFANSKKY TKVGYVYREP | 240 |
| GWLEKEKPKK LCDQAQRSRK TRKIPKKD | 268 |

SEQ ID NO: 220

| | |
|---|---|
| atggcttcag aaaaagaaat taggagagag agattcttga acgttttccc taaattagta | 60 |
| gaggaattga acgcatcgct tttggcttac ggtatgccta aggaagcatg tgactggtat | 120 |
| gcccactcat tgaactacaa cactccaggc ggtaagctaa atagaggttt gtccgttgtg | 180 |
| gacacgtatg ctattctctc caacaagacc gttgaacaat tggggcaaga agaatacgaa | 240 |
| aaggttgcca ttctaggttg gtgcattgag ttgttgcagg cttacttctt ggtcgccgat | 300 |
| gatatgatgg acaagtccat taccagaaga ggccaaccat gttggtacaa ggttcctgaa | 360 |
| gttggggaaa ttgccatcaa tgacgcattc atgttagagg ctgctatcta caagcttttg | 420 |
| aaatctcact tcagaaacga aaaatactac atagatatca ccgaattgtt ccatgaggtc | 480 |
| accttccaaa ccgaattggg ccaattgatg gacttaatca ctgcacctga agacaaagtc | 540 |
| gacttgagta agttctccct aaagaagcac tccttcatag ttactttcaa gactgcttac | 600 |
| tattctttct acttgcctgt cgcattggcc atgtacgttg ccggtatcac ggatgaaaag | 660 |
| gatttgaaac aagccagaga tgtcttgatt ccattgggtg aatacttcca aattcaagat | 720 |
| gactacttag actgcttcgg taccccagaa cagatcggta agatcggtac agatatccaa | 780 |
| gataacaaat gttcttgggt aatcaacaag gcattggaac ttgcttccgc agaacaaaga | 840 |
| aagactttag acgaaaatta cggtaagaag gactcagtcg cagaagccaa atgcaaaaag | 900 |
| attttcaatg acttgaaaat tgaacagcta taccacgaat atgaagagtc tattgccaag | 960 |
| gatttgaagg ccaaaatttc tcaggtcgat gagtctcgtg gcttcaaagc tgatgtctta | 1020 |
| actgcgttct tgaacaaagt ttacaagaga agcaaaggtt ctagtactgg ttcatctaca | 1080 |
| tctactggaa tggtcgcaca aactttcaac ctggatacct acttatccca aagacaacaa | 1140 |
| caagttgaag aggccctaag tgctgctctt gtgccagctt atcctgagag aatatacgaa | 1200 |
| gctatgagat actccctcct ggcaggtggc aaaagattaa gacctatctt atgtttagct | 1260 |
| gcttgcgaat tggcaggtgg ttctgttgaa caagccatgc caactgcgtg tgcacttgaa | 1320 |
| atgatccata caatgtcact aattcatgat gacctgccag ccatggataa cgatgatttc | 1380 |
| agaagaggaa agccaactaa tcacaaggtg ttcggggaag atatagccat cttagcgggt | 1440 |
| gatgcgcttt tagcttacgc ttttgaacat attgcttctc aaacaagagg agtaccacct | 1500 |
| caattggtgc tacaagttat tgctagaatc ggacacgccg ttgctgcaac aggcctcgtt | 1560 |
| ggaggccaag tcgtagacct tgaatctgaa ggtaaagcta tttccttaga aacattggag | 1620 |
| tatattcact cacataagac tggagccttg ctggaagcat cagttgtctc aggcggtatt | 1680 |
| ctcgcagggg cagatgaaga gcttttggcc agattgtctc attacgctag agatataggc | 1740 |
| ttggcttttc aaatcgtcga tgatatcctg gatgttactg ctacatctga acagttgggg | 1800 |
| aaaaccgctg gtaaagacca ggcagccgca aaggcaactt atccaagtct attgggttta | 1860 |
| gaagcctcta gacagaaagc ggaagagttg attcaatctg ctaaggaagc cttaagacct | 1920 |
| tacggttcac aagcagagcc actcctagcg ctggcagact tcatcacacg tcgtcagcat | 1980 |
| taa | 1983 |

SEQ ID NO: 221

| | |
|---|---|
| MASEKEIRRE RFLNVFPKLV EELNASLLAY GMPKEACDWY AHSLNYNTPG GKLNRGLSVV | 60 |
| DTYAILSNKT VEQLGQEEYE KVAILGWCIE LLQAYFLVAD DMMDKSITRR GQPCWYKVPE | 120 |
| VGEIAINDAF MLEAAIYKLL KSHFRNEKYY IDITELFHEV TFQTELGQLM DLITAPEDKV | 180 |
| DLSKFSLKKH SFIVTFKTAY YSFYLPVALA MYVAGITDEK DLKQARDVLI PLGEYFQIQD | 240 |
| DYLDCFGTPE QIGKIGTDIQ DNKCSWVINK ALELASAEQR KTLDENYGKK DSVAEAKCKK | 300 |
| IFNDLKIEQL YHEYEESIAK DLKAKISQVD ESRGFKADVL TAFLNKVYKR SKGSSTGSST | 360 |
| STGMVAQTFN LDTYLSQRQQ QVEEALSAAL VPAYPERIYE AMRYSLLAGG KRLRPILCLA | 420 |
| ACELAGGSVE QAMPTACALE MIHTMSLIHD DLPAMDNDDF RRGKPTNHKV FGEDIAILAG | 480 |
| DALLAYAFEH IASQTRGVPP QLVLQVIARI GHAVAATGLV GGQVVDLESE GKAISLETLE | 540 |
| YIHSHKTGAL LEASVVSGGI LAGADEELLA RLSHYARDIG LAFQIVDDIL DVTATSEQLG | 600 |
| KTAGKDQAAA KATYPSLLGL EASRQKAEEL IQSAKEALRP YGSQAEPLLA LADFITRRQH | 660 |

SEQ ID NO: 222

| | |
|---|---|
| atgacagaga gggagctcca cgcggatgtg cgaaggttct atcaacacac ttctcaaact | 60 |
| ctaaccggcc tgcgacctta tcccaccgag cgagaagtcc aagatgcagc cgcggcgtgg | 120 |
| cagcaaaagg acaacatcga gaatgccatc cgcgaagcgg ttcgaaaggg cagcccagat | 180 |
| agcggcggca ctacggacac cgtcataccc ctcagtgccg ccgagaaacg cgctctgatc | 240 |
| aacgagattg accattcgtt ctctgagaac gggatgtgga tggtcatctt cactgtcagt | 300 |
| ctgagtgcct ttctccaggg ctttgtacag agtagtcaga acggtgcaaa tctctttgct | 360 |
| gatcagtggc ttaagtctca gaagcatact gtcaactccc agttcgctta tgccaacgca | 420 |
| gctgtttact tcagcgctgc tgttatagga tgtccactgg ctgcaccgat gagttcactg | 480 |
| tttggtcgcc gtggtgtcat tattgtcgcc tcatttctca tctttgcggc atccgttggc | 540 |
| tcggcttgca ttacactcaa tgacaacgca tggctgtctc ttaggagcat cagactaatc | 600 |
| ggcggtgtcg gcatgggctt aaaggctact agcaccccca tcctcgcagc ggaaacggca | 660 |
| gttggctcgt ggagaggctc ttcagttctg ttatggcagc tatgggtctc ttttggcatc | 720 |
| atgatgtctt ttattgtcaa tatttgcttg aaccagattg acgacaagaa tctaaagctc | 780 |
| cggttgattc tggcgtctcc agcagtgttt gcgcttatgc tgatgtatac tgtcgccaaa | 840 |
| tgccctgagt cattccgcta ctacttgatg ccaggttcga gaaagtatag ccctgagaag | 900 |
| gcatatgcct cgttgctacg attgcgcaac accaaggtcg gtcacaacac ttctacacat | 960 |
| cccttttggc ttaccccttc gttccccttc acaacctgca ccgtcgaaca acatctgata | 1020 |
| caagcggtca cagctacaag cagtcagaga cttgtacttg acgccgcccc gaaacctcga | 1080 |
| accctagtag ttggagctgt cagtcactac gtgcgacaat actggaagat cctgaaagtc | 1140 |
| catcgccttc ggaatgcagc tattacaaca gggattgtgg ctttgtcgca gcaactttct | 1200 |
| ggaattaacc tcatggcgtt ctacggtggg acaacacttg taggtattag tccaggcaat | 1260 |
| cagccaacag aagatcaaat ctccaaggcc atgctgtaca acttgatctt tggtctgtcg | 1320 |
| aacttcttat tctgcttacc cgccatccat tccatagacg ttctgggaag aaggagggtt | 1380 |
| ctactcttca caatcccagg tatggcctta accttgatgg cagcggctat aagcttcaat | 1440 |
| acggcaaatg aggatgtgag aaacggactt gtagccttct ggatctactt tcacacagta | 1500 |
| ttttatagcc cgggaatggg gccagtgccg ttcgtgttag cttcggaaag ctttcctttg | 1560 |
| gcctttcgtg acaccggcgc atcgcttgca atatccatca accttctatt cgctggcctc | 1620 |
| ctggcatggc tgcaacccct actggtcact ggtattagat tcgggggaac acttggggtg | 1680 |
| tttgctggct tgaacgtcgt tgcctttgct ctcatctttc tcctgatgga ggaaaccagc | 1740 |
| ggcgtacctc ttgagtctct aggatctgtc ttcgaccagt cgaagaagga tctgatccac | 1800 |
| ttccaactct tcaagttttt accatggttc ggtcggttca ttcttggtag gagtagtctt | 1860 |
| gccgaaagac cagaacgtac tgtcgacttg agtccgagct cggtgacagc tgcttcggtc | 1920 |
| actgatgatg acgatgagga acgcatttgg aatagcgata ctgtttcaag tggggtgagg | 1980 |
| ctcgccgata tgttgggggg aaacggaaga ggctga | 2016 |

SEQ ID NO: 223

| | |
|---|---|
| atgtccttca ttaaaaactt gttatttgga ggtgttaaaa caagtgagga tccaaccggg | 60 |
| ctcacaggta acggggcctc aaacacaaac gattctaata aaggtagtga accggtagta | 120 |
| gcgggtaatt tctttcctag gacgctttcc aaatttaacg gccacgacga tgaaaaaata | 180 |
| tttattgcta ttaggggcaa agtatacgac tgcacaagag ggaggcagtt ttacggtcca | 240 |
| agcgggccat acactaactt tgcaggccat gatgcgtcgc gtggtcttgc attgaactcc | 300 |
| ttcgatctgg acgttattaa agattgggat cagcctatcg atcccttaga tgatctgaca | 360 |
| aaagaacaga ttgacgcact ggatgagtgg caagagcatt ttgagaataa gtacccatgc | 420 |
| attggtactc tgattccgga gcctggcgtg aacgtatga | 459 |

SEQ ID NO: 224

| | |
|---|---|
| MSFIKNLLFG GVKTSEDPTG LTGNGASNTN DSNKGSEPVV AGNFFPRTLS KFNGHDDEKI | 60 |
| FIAIRGKVYD CTRGRQFYGP SGPYTNFAGH DASRGLALNS FDLDVIKDWD QPIDPLDDLT | 120 |
| KEQIDALDEW QEHFENKYPC IGTLIPEPGV NV | 152 |

SEQ ID NO: 225

| | |
|---|---|
| atgtcaagtc cattagacgc ggctggtcta gctattgcta caacagagtt gtgcagaaac | 60 |
| ttggcgactg ggctgtactt cattatcaga gagatcagag atgcttctaa agatgcagaa | 120 |
| attatgcaag atacattagc agcgttacat accagattgg accaagttag agctttattt | 180 |
| gacgccaacg ttccacagag tccattggaa aaagattata gaaactccat agacagaaca | 240 |
| ttagagaata ttcacagaga tctgtcttta ttaactagta aattgcatat tgacgtcatc | 300 |
| ttagaagcga aaggttcaaa aagattagag gcctggtacg tcttacagcg taaatttcaa | 360 |
| tcagatgata tcaggaatat caaacagaga cttgcagggt ccgaggaact gcttcagtct | 420 |
| catttcgaaa tgttgtcaat atatatctct tacaggacca gagacgaggt aacagacttt | 480 |
| aaagctttcg tcagaccgat tttagagaag ctgttgtttc atgcaacgtt gacagaggaa | 540 |
| agacaaagat accaagcagc tgagtcaaga tctattaaaa gattacaaca cgtcactaat | 600 |
| gccctaggca ctggtaatac attccctgga gaagaatcag atttcgaata tcatgacgca | 660 |
| tttaagactt ggaaagacaa gtctgaagct atgattatgt ctatcgcaga tccaccttgg | 720 |
| catcaagtgt caaattctaa ctacgtccca tcaattcgta atgaatctcg tgatggcgca | 780 |
| tcaatattgc caactgtacg tgattttaga gaaaaaaacg gcatgtatcc cagcttgcgt | 840 |
| gttacaccca acttaagcca cgttgaagag atcttagatg aatcattaca tcaggatgtt | 900 |
| acagaagatt tgattaattg gtgtaaagag cagggattcc cagtcaacgt ctcaaacttt | 960 |
| aggtacgatt taatttggga ggcggcacct gtggccctta aaggaacgtc acctatgcat | 1020 |
| caagccataa aaactaataa tatggttgtt ttggaaaaaa tgttgtccag agattgtaac | 1080 |
| atagaagtca ggctggagga cggttctcaa gatccaaccc cactactatt agctggctct | 1140 |
| gaactaaatg cagttgctgt taagctgtta ttaaccaaag gtgccaaagc agatgctaca | 1200 |
| gatagaactg gaaaaacagg tctacatttg tgccaatccc ctaaattcga gggtagaaga | 1260 |
| gtggctaaac tattgttggg tgactctaga gctgaggcgt tagatgttaa tgcacaagat | 1320 |
| cagtttggca tgactgcagc tcacatcgcc gctagagtag gcgatgttaa aatgttagag | 1380 |
| tacctactat tggaccagta cggaaagaag gtagctgatg ccaacgccca acagcaagat | 1440 |
| ggttcaaccc cgttgatggt cgcattgaaa agcaacatcg caaataaaaa acaagtgatt | 1500 |
| gatgtcttgt ctaggtgctc cgatttgtca attaaaaaca agaacggtga agacgcgaaa | 1560 |
| gaggtagccg caaagcatag tccgaaagat gtaagaaagt atcttttagc tcatctagac | 1620 |
| caagattcaa ctaggtctcg taggatctct gaatccacaa cagttgtgtc cggaatttct | 1680 |
| gtgcagatga gagaggaatc ttgttcaggg tgccgtaggc attgtccaca atttactgac | 1740 |
| tgtaaattgt caataggtga ctctgcattt tcccaggatt ggaagagatc cttgcgtaag | 1800 |
| tactcctctg atcaatcaag tatagcgatg gggtctagca gttccattcg tcaggccaga | 1860 |
| taa | 1863 |

SEQ ID NO: 226

| | |
|---|---|
| at tttgcca agttcgacat gctagaagaa gaggctagag cacttgttag aaaagtaggc | 60 |
| aatgctgttg atcccattta cggattcagt acaacctcct gccaaattta cgatacggca | 120 |
| tgggctgcta tgattagtaa ggaagaacat ggagataagg tttggttgtt tccagaatct | 180 |
| ttcaaatact tactagaaaa gcaaggtgag gatggtagtt gggaaaggca tccaaggagt | 240 |
| aaaacagtag gggtgctaaa tacagctgca gcgtgcttag ctttattgcg tcacgttaag | 300 |
| aatccacttc agcttcaaga tatagcagct caggatatag aacttagaat tcaaagaggt | 360 |
| ctaaggagtc tagaagaaca gcttattgcg tgggacgatg tccttgacac aaatcacatt | 420 |
| ggtgtcgaga tgattgtccc ggctctactt gattaccttc aagctgaaga tgaaaatgta | 480 |
| gattttgaat tcgagtcaca ctctttgctt atgcagatgt ataaggagaa gatggcccgt | 540 |
| ttctcaccag aatccttata tcgtgcaagg cccagttctg ctctgcataa tttagaagcg | 600 |
| ctaattggta agcttgattt tgataaggtg ggtcaccatc tgtacaatgg tagtatgatg | 660 |
| gcctcacctt catctactgc ggctttccta atgcatgcct caccttggtc acacgaggca | 720 |
| gaagcatatc taagacatgt ttttgaagct ggcactggga agggctccgg cggatttccc | 780 |
| ggtacatatc ctactacata ctttgaatta aattgggttc tatcaacctt gatgaaatca | 840 |
| gggtttactt tgtcagatct tgagtgcgat gaattatcaa gcatagcaaa cactatagca | 900 |
| gagggtttcg aatgcgacca tggagtgatc gggtttgccc caagagctgt tgatgttgat | 960 |
| gatactgcaa aaggactact tacccttacg ttattgggca tggacgaagg ggtgagccca | 1020 |
| gcacccatga ttgcgatgtt tgaagctaaa gatcatttcc taacgttcct gggtgaaaga | 1080 |
| gatccttcat tcaccagtaa ttgtcacgtt ctattatctt tactacaccg taccgactta | 1140 |
| ctgcaatatc tgccacagat tagaaaaact acaacttttc tatgcgaagc ctggtgggct | 1200 |
| tgtgatggtc aaataaaaga taaatggcat cttagtcatc tatatccgac tatgttgatg | 1260 |
| gtccaggcat ttgctgagat ccttctgaag tccgcagaag gtgaaccatt gcacgatgct | 1320 |
| ttcgacgcag ccactttgtc tagagtctca atttgtgttt ttcaagcttg tcttcgtact | 1380 |
| ttgttggcac aatcacaaga tggtagctgg cacggtcaac cggaggcgtc ttgctatgca | 1440 |
| gtattaacac tagctgagag cgggagactt gttcttttgc aagcgcttca accacagatt | 1500 |
| gcagccgcca tggagaaggc tgcggatgtt atgcaagcgg gaagatggtc ctgtagcgat | 1560 |
| cacgattgtg attggacttc caaaacagcc taccgtgtag atttggtggc tgcagcttac | 1620 |
| aggctggcag ccatgaaggc ttcctctaac ttgaccttta ctgttgatga caatgtgtca | 1680 |
| aagaggtcca acggttttca acagttggtg ggaagaacag atctattctc tggagtgcca | 1740 |
| gcatgggaac tgcaagcatc attcttagaa agtgcgcttt ttgttcccct attaaggaac | 1800 |
| catagactag atgtgtttga tagggacgac ataaaagttt caaaggatca ttatttagat | 1860 |
| atgattccat ttacgtgggt aggttgtaat aacaggtcta gaacatacgt gagtacgtcc | 1920 |
| ttcttattcg atatgatgat catctctatg ttaggttatc aaatagacga gttcttcgag | 1980 |
| gccgaagctg cacctgcttt cgcacaatgt ataggccaat tacaccaagt cgttgacaaa | 2040 |
| gtcgttgatg aagtcatcga cgaagttgtc gacaaggtgg tcggcaaggt tgtgggcaag | 2100 |
| gttgtaggta aggtggtgga cgagcgtgtc gactctccga cccatgaagc aatagcgata | 2160 |
| tgcaatattg aagcctcttt gaggagattt gtggatcatg ttctacatca ccaacatgta | 2220 |
| ttacacgcaa gccaacaaga gcaagacatt ttatggcgtg aattgagagc ttttttacac | 2280 |
| gctcacgttg tgcaaatggc tgacaattct actctggcgc ctcctggcag gacattcttc | 2340 |
| gactgggtta ggacaactgc tgctgatcat gtagcctgcg cttactcttt cgcattcgcc | 2400 |
| tgctgtatta cttccgcaac gatcggacag ggccaatcta tgttcgctac tgttaatgag | 2460 |
| ctgtatcttg ttcaagcagc agctagacat atgactacca tgtgcagaat gtgcaatgat | 2520 |
| attggtagtg ttgataggga tttcattgaa gccaatataa attctgttca tttccctgaa | 2580 |
| ttttctactc taagccttgt ggcagataag aaaaaagccc ttgcccgttt agcagcttat | 2640 |
| gaaaaatctt gtttgaccca taccttagat caatttgaaa atgaagttct acaatcccca | 2700 |
| agagtttcat ccgcagcctc cggcgatttt aggacaagga aagtggcagt ggtaaggttc | 2760 |
| ttcgcggatg tgaccgattt ttatgaccag ttatatattc tgagagatct ttcatcttct | 2820 |
| ttaaagcatg tcggcaccta a | 2841 |

SEQ ID NO: 227:

| | |
|---|---|
| MFAKFDMLEE EARALVRKVG NAVDPIYGFS TTSCQIYDTA WAAMISKEEH GDKVWLFPES | 60 |
| FKYLLEKQGE DGSWERHPRS KTVGVLNTAA ACLALLRHVK NPLQLQDIAA QDIELRIQRG | 120 |
| LRSLEEQLIA WDDVLDTNHI GVEMIVPALL DYLQAEDENV DFEFESHSLL MQMYKEKMAR | 180 |
| FSPESLYRAR PSSALHNLEA LIGKLDFDKV GHHLYNGSMM ASPSSTAAFL MHASPWSHEA | 240 |
| EAYLRHVFEA GTGKGSGGFP GTYPTTYFEL NWVLSTLMKS GFTLSDLECD ELSSIANTIA | 300 |
| EGFECDHGVI GFAPRAVDVD DTAKGLLTLT LLGMDEGVSP APMIAMFEAK DHFLTFLGER | 360 |
| DPSFTSNCHV LLSLLHRTDL LQYLPQIRKT TTFLCEAWWA CDGQIKDKWH LSHLYPTMLM | 420 |
| VQAFAEILLK SAEGEPLHDA FDAATLSRVS ICVFQACLRT LLAQSQDGSW HGQPEASCYA | 480 |
| VLTLAESGRL VLLQALQPQI AAAMEKAADV MQAGRWSCSD HDCDWTSKTA YRVDLVAAAY | 540 |
| RLAAMKASSN LTFTVDDNVS KRSNGFQQLV GRTDLFSGVP AWELQASFLE SALFVPLLRN | 600 |
| HRLDVFDRDD IKVSKDHYLD MIPFTWVGCN NRSRTYVSTS FLFDMMIISM LGYQIDEFFE | 660 |
| AEAAPAFAQC IGQLHQVVDK VVDEVIDEVV DKVVGKVVGK VVGKVVDERV DSPTHEAIAI | 720 |
| CNIEASLRRF VDHVLHHQHV LHASQQEQDI LWRELRAFLH AHVVQMADNS TLAPPGRTFF | 780 |
| DWVRTTAADH VACAYSFAFA CCITSATIGQ GQSMFATVNE LYLVQAAARH MTTMCRMCND | 840 |
| IGSVDRDFIE ANINSVHFPE FSTLSLVADK KKALARLAAY EKSCLTHTLD QFENEVLQSP | 900 |
| RVSSAASGDF RTRKVAVVRF FADVTDFYDQ LYILRDLSSS LKHVGT | 946 |

SEQ ID NO: 228:

| | |
|---|---|
| atgcctggta agatagaaaa tggcaccccg aaagatttaa aaactggtaa tgattttgtg | 60 |
| tctgccgcaa aatcattgct tgacagggct tttaaaagcc atcacagtta ttacggttta | 120 |
| tgctccacca gctgtcaggt ttacgatact gcgtgggtgg cgatgattcc aaaaacaaga | 180 |
| gacaatgtga agcaatggct atttccggag tgtttccatt acttgctgaa aacccaagct | 240 |
| gctgatggca gctggggttc tttgccaact acacaaactg caggtattct ggatactgca | 300 |
| tctgctgtac ttgccctgtt atgccacgct caggaaccat tacaaatctt agatgtttca | 360 |
| ccagacgaga tgggtttgcg tattgaacat ggggtgactt ctcttaagag acaattggct | 420 |
| gtttggaacg atgtcgagga cacaaatcac ataggtgtag aattcattat cccagcttta | 480 |
| cttagcatgt tggaaaagga attggatgtt ccctcattcg aatttccttg tcgttcaatt | 540 |
| ctggaaagaa tgcacgggga aaaacttggg cacttcgatc ttgaacaagt ctacggtaaa | 600 |
| ccgtcatcct tgttacactc tctagaggct tttttaggta aattggactt cgataggttg | 660 |
| tctcatcacc tataccacgg ttccatgatg gctagcccgt catctacggc tgcttacttg | 720 |
| attggtgcca caaaatggga tgatgaggca gaagattatc ttcgtcatgt tatgaggaac | 780 |
| ggcgccggtc acggcaacgg tggtatatct ggtacattcc cgactacaca cttcgagtgc | 840 |
| tcatggataa tagcaacttt actaaaagta ggttttacat taaaacagat tgatggtgat | 900 |
| ggcttgaggg ggctatctac tatcttactt gaagcattga gggatgagaa tggggtgata | 960 |
| ggattcgctc caagaacagc agatgtagat gatacagcta aagcgttgtt ggctttgagc | 1020 |
| ttggttaatc aaccagtttc ccctgacatc atgatcaagg ttttcgaggg gaaagatcac | 1080 |
| tttaccactt ttggcagcga aagggatcct tctttaacat ccaacttaca tgttctttta | 1140 |
| tctttgttga agcagtcaaa tttgagtcag taccatcccc agatcttaaa gaccacacta | 1200 |
| tttacatgta gatggtggtg gggttccgat cactgcgtaa aagataagtg gaacctttct | 1260 |
| catctatatc ctacaatgtt attagtcgag gcattcacgg aagttcttca cttaattgac | 1320 |
| ggcggtgaac tatccagcct atttgatgaa tcctttaagt gcaaaatagg tttatcaatc | 1380 |
| tttcaagcag tattgcgtat catactaaca caagataatg atggtagctg gcgtggatat | 1440 |
| agagaacaaa catgttacgc tatcttggct ttagttcagg ctagacacgt ctgtttcttc | 1500 |
| actcatatgg tagacagatt gcagagttgc gtggacagag gtttttcctg gcttaaatcc | 1560 |
| tgttcatttc attctcaaga tttaacgtgg acttctaaga cagcatatga agttgggttc | 1620 |
| gtagctgagg catataaatt agctgcattg cagtcagcgt ctcttgaagt gccggcagcc | 1680 |
| accatcggac atagtgttac gagtgcagta ccttcatctg atcttgaaaa atatatgagg | 1740 |
| ttagttagaa aaacggcctt gttttccccg ttggatgagt ggggtcttat ggcttccatt | 1800 |
| atagaatcta gtttttttgt gccactttta caagcccaga gagttgagat ttacccaaga | 1860 |
| gacaacatta aggttgatga ggacaagtac ttgagcatta tcccattcac ctgggtcgga | 1920 |
| tgtaacaacc gttctagaac tttcgcctct aacagatggt tatatgatat gatgtatttg | 1980 |
| tcattgttgg gttaccaaac tgatgagtac atggaagcag ttgccgggcc cgtgttcgga | 2040 |
| gacgtgtctt tattgcacca aactatagac aaggtgatag ataatactat gggtaatttg | 2100 |
| gctagagcaa acggtacggt tcatagtggt aatggtcacc agcacgaatc tccgaatata | 2160 |
| ggtcaggtcg aagacactct gacaagattt actaattccg ttctaaatca taaagacgta | 2220 |
| ttaaacagtt ccagttcaga tcaggatact ttaagaagag aattccgtac attcatgcat | 2280 |
| gcacatatta ctcaaattga ggacaattct aggttttcta agcaagcttc ctcagatgca | 2340 |
| ttctcatctc cagaacagtc ttatttccag tgggttaatt ccacaggagg ctctcatgtt | 2400 |
| gcctgcgcct atagcttcgc tttttcaaac tgtctgatga gtgcgaattt actacagggc | 2460 |
| aaggatgcat ttccttctgg tactcagaaa taccttatct catcagttat gagacatgcg | 2520 |
| actaatatgt gcagaatgta caatgatttt gggagtatag ccagagataa tgctgaaaga | 2580 |
| aatgttaata gtatccattt tcctgagttt acactgtgca atggaacaag ccagaaccta | 2640 |
| gacgaaagaa aagaaagatt attgaaaatc gcaacttacg agcagggcta cctagatagg | 2700 |
| gcattagaag cgttggaaag acagtcaaga gatgacgcag gtgacagggc aggatccaag | 2760 |
| gatatgagaa aactaaagat tgtaaaactt ttttgcgacg ttacagacct gtacgaccaa | 2820 |
| ttatacgtta ttaaagattt gtcttcttct atgaaatga | 2859 |

SEQ ID NO: 229:

| | |
|---|---|
| MPGKIENGTP KDLKTGNDFV SAAKSLLDRA FKSHHSYYGL CSTSCQVYDT AWVAMIPKTR | 60 |
| DNVKQWLFPE CFHYLLKTQA ADGSWGSLPT TQTAGILDTA SAVLALLCHA QEPLQILDVS | 120 |
| PDEMGLRIEH GVTSLKRQLA VWNDVEDTNH IGVEFIIPAL LSMLEKELDV PSFEFPCRSI | 180 |
| LERMHGEKLG HFDLEQVYGK PSSLLHSLEA FLGKLDFDRL SHHLYHGSMM ASPSSTAAYL | 240 |
| IGATKWDDEA EDYLRHVMRN GAGHGNGGIS GTFPTTHFEC SWIIATLLKV GFTLKQIDGD | 300 |
| GLRGLSTILL EALRDENGVI GFAPRTADVD DTAKALLALS LVNQPVSPDI MIKVFEGKDH | 360 |
| FTTFGSERDP SLTSNLHVLL SLLKQSNLSQ YHPQILKTTL FTCRWWWGSD HCVKDKWNLS | 420 |
| HLYPTMLLVE AFTEVLHLID GGELSSLFDE SFKCKIGLSI FQAVLRIILT QDNDGSWRGY | 480 |
| REQTCYAILA LVQARHVCFF THMVDRLQSC VDRGFSWLKS CSFHSQDLTW TSKTAYEVGF | 540 |
| VAEAYKLAAL QSASLEVPAA TIGHSVTSAV PSSDLEKYMR LVRKTALFSP LDEWGLMASI | 600 |
| IESSFFVPLL QAQRVEIYPR DNIKVDEDKY LSIIPFTWVG CNNRSRTFAS NRWLYDMMYL | 660 |
| SLLGYQTDEY MEAVAGPVFG DVSLLHQTID KVIDNTMGNL ARANGTVHSG NGHQHESPNI | 720 |
| GQVEDTLTRF TNSVLNHKDV LNSSSSDQDT LRREFRTFMH AHITQIEDNS RFSKQASSDA | 780 |
| FSSPEQSYFQ WVNSTGGSHV ACAYSFAFSN CLMSANLLQG KDAFPSGTQK YLISSVMRHA | 840 |
| TNMCRMYNDF GSIARDNAER NVNSIHFPEF TLCNGTSQNL DERKERLLKI ATYEQGYLDR | 900 |
| ALEALERQSR DDAGDRAGSK DMRKLKIVKL FCDVTDLYDQ LYVIKDLSSS MK | 952 |

SEQ ID NO: 230:

| | |
|---|---|
| atgagtaagt ctaatagtat gaattctaca tcacacgaaa ccctttttca acaattggtc | 60 |
| ttgggtttgg accgtatgcc attgatggat gttcactggt tgatctacgt tgctttcggc | 120 |
| gcatggttat gttcttatgt gatacatgtt ttatcatctt cctctacagt aaaagtgcca | 180 |
| gttgttggat acaggtctgt attcgaacct acatggttgc ttagacttag attcgtctgg | 240 |
| gaaggtggct ctatcatagg tcaagggtac aataagttta aagactctat tttccaagtt | 300 |
| aggaaattgg gaactgatat tgtcattata ccacctaact atattgatga agtgagaaaa | 360 |
| ttgtcacagg acaagactag atcagttgaa cctttcatta atgattttgc aggtcaatac | 420 |
| acaagaggca tggttttctt gcaatctgac ttacaaaacc gtgttataca acaaagacta | 480 |
| actccaaaat tggtttcctt gaccaaggtc atgaaggaag agttggatta tgctttaaca | 540 |
| aaagagatgc ctgatatgaa aaatgacgaa tgggtagaag tagatatcag tagtataatg | 600 |
| gtgagattga tttccaggat ctccgccaga gtctttctag ggcctgaaca ctgtcgtaac | 660 |
| caggaatggt tgactactac agcagaatat tcagaatcac ttttcattac agggtttatc | 720 |
| ttaagagttg tacctcatat cttaagacca ttcatcgccc ctctattacc ttcatacagg | 780 |
| actctactta gaaacgtttc aagtggtaga agagtcatcg gtgacatcat aagatctcag | 840 |
| caaggggatg gtaacgaaga tatactttcc tggatgagag atgctgccac aggagaggaa | 900 |
| aagcaaatcg ataacattgc tcagagaatg ttaattcttt ctttagcatc aatccacact | 960 |
| actgcgatga ccatgacaca tgccatgtac gatctatgtg cttgccctga gtacattgaa | 1020 |
| ccattaagag atgaagttaa atctgttgtt ggggcttctg gctgggacaa gacagcgtta | 1080 |
| aacagatttc ataagttgga ctccttccta aaagagtcac aaagattcaa cccagtattc | 1140 |
| ttattgacat tcaatagaat ctaccatcaa tctatgacct tatcagatgg cactaacatt | 1200 |
| ccatctggaa cacgtattgc tgttccatca cacgcaatgt tgcaagattc tgcacatgtc | 1260 |
| ccaggtccaa ccccacctac tgaatttgat ggattcagat atagtaagat acgttctgat | 1320 |
| agtaactacg cacaaaagta cctattctcc atgaccgatt cttcaaacat ggctttcgga | 1380 |
| tacggcaagt atgcttgtcc aggtagattt tacgcgtcta atgagatgaa actaacatta | 1440 |
| gccattttgt tgctacaatt tgagttcaaa ctaccagatg gtaaaggtcg tcctagaaat | 1500 |
| atcactatcg attctgatat gattccagac ccaagagcta gactttgcgt cagaaaaaga | 1560 |
| tcacttagag atgaatga | 1578 |

SEQ ID NO: 231

| | |
|---|---|
| MSKSNSMNST SHETLFQQLV LGLDRMPLMD VHWLIYVAFG AWLCSYVIHV LSSSSTVKVP | 60 |
| VVGYRSVFEP TWLLRLRFVW EGGSIIGQGY NKFKDSIFQV RKLGTDIVII PPNYIDEVRK | 120 |
| LSQDKTRSVE PFINDFAGQY TRGMVFLQSD LQNRVIQQRL TPKLVSLTKV MKEELDYALT | 180 |
| KEMPDMKNDE WVEVDISSIM VRLISRISAR VFLGPEHCRN QEWLTTTAEY SESLFITGFI | 240 |
| LRVVPHILRP FIAPLLPSYR TLLRNVSSGR RVIGDIIRSQ QGDGNEDILS WMRDAATGEE | 300 |
| KQIDNIAQRM LILSLASIHT TAMTMTHAMY DLCACPEYIE PLRDEVKSVV GASGWDKTAL | 360 |
| NRFHKLDSFL KESQRFNPVF LLTFNRIYHQ SMILSDGINI PSGTRIAVPS HAMLQDSAHV | 420 |
| PGPTPPTEFD GFRYSKIRSD SNYAQKYLFS MTDSSNMAFG YGKYACPGRF YASNEMKLTL | 480 |
| AILLLQFEFK LPDGKGRPRN ITIDSDMIPD PRARLCVRKR SLRDE | 525 |

SEQ ID NO: 232

| | |
|---|---|
| atgtctattt tcaacatgat tacttcatat gctgggagtc aactcttacc attttacata | 60 |
| gcaatattcg ttttcacatt ggttccatgg gctattagat tctcatggtt ggaacttaga | 120 |
| aaggggtcag tagtgccact ggccaaccca cctgactcat tattcggcac aggcaagaca | 180 |
| cgtagatctt tcgttaaact ttccagagaa atactagcca aggcaagatc tctatttcca | 240 |
| aacgaaccat ttagattgat cacagactgg ggagaggttc ttattcttcc tcctgatttt | 300 |
| gccgatgaaa ttagaaacga tcctagatta tctttctcta aagctgcaat gcaggataat | 360 |
| catgccggca tcccaggttt cgaaacagtc gcattagttg gtagagaaga tcaacttatt | 420 |
| caaaaagttg ctagaaaaca actcacaaag cacctgtctg cagtcataga gcctttatct | 480 |
| agagagtcaa ccctagccgt ttcattgaat tttggtgaaa ctactgaatg gagagctata | 540 |
| agactaaagc cagccatttt ggatatcatt gctagaatca gctccagaat ctacctaggg | 600 |
| gatcagttgt gcagaaatga ggcatggttg aagattacaa agacatatac aaccaacttc | 660 |
| tacactgctt ctacaaactt gcgtatgttc ccaagatcaa tcagaccatt agcgcactgg | 720 |
| ttcttgcctg aatgcagaaa gttgagacaa gagagaaaag atgctatagg tatcattaca | 780 |
| ccattgatcg aaagacgtag agagttacgt agagcagcaa tcgctgccgg tcaacctctc | 840 |
| ccagtgtttc atgatgcaat cgactggtct gaacaggaag ctgaggcagc cggaactggt | 900 |
| gccagtttcg accctgttat ctttcaacta accttgtcct tgctggcaat tcataccact | 960 |
| tacgatctgt tacaacaaac tatgattgat ttaggtagac acccagagta cattgaacca | 1020 |
| ctaagacaag aggtagtaca gctgttgaga gaagagggat ggaaaaagac cacattattc | 1080 |
| aagatgaagt tattagactc cgcgattaag gaaagtcaga gaatgaaacc tggttctata | 1140 |
| gtcacaatgc gtagatacgt tactgaggat atcacccttt catcaggtct tacattgaaa | 1200 |
| aagggaacaa gattgaacgt ggacaataga agattggatg atcctaagat ttacgataac | 1260 |
| ccagaagtct acaatccata cagattttac gatatgagat ccgaagcggg taaggaccat | 1320 |
| ggtgctcaat tagtatctac aggttcaaac cacatgggtt ttggtcatgg acaacattct | 1380 |
| tgtccaggca gattcttcgc tgcaaacgaa atcaaggttg cactatgtca tatcttagtg | 1440 |
| aaatacgact ggaagctctg tccagatact gaaactaagc cagacacaag aggcatgatt | 1500 |
| gctaagagtt ctccagttac tgatatcctt atcaaaagac gtgaaagcgt cgaacttgat | 1560 |
| ttggaagcaa tttag | 1575 |

SEQ ID NO: 233

| | |
|---|---|
| MSIFNMITSY AGSQLLPFYI AIFVFTLVPW AIRFSWLELR KGSVVPLANP PDSLFGTGKT | 60 |
| RRSFVKLSRE ILAKARSLFP NEPFRLITDW GEVLILPPDF ADEIRNDPRL SFSKAAMQDN | 120 |
| HAGIPGFETV ALVGREDQLI QKVARKQLTK HLSAVIEPLS RESTLAVSLN FGETTEWRAI | 180 |
| RLKPAILDII ARISSRIYLG DQLCRNEAWL KITKTYTINF YTASTNLRMF PRSIRPLAHW | 240 |
| FLPECRKLRQ ERKDAIGIIT PLIERRRELR RAAIAAGQPL PVFHDAIDWS EQEAEAAGTG | 300 |
| ASFDPVIFQL TLSLLAIHTT YDLLQQTMID LGRHPEYIEP LRQEVVQLLR EEGWKKTTLF | 360 |
| KMKLLDSAIK ESQRMKPGSI VIMRRYVTED ITLSSGLTLK KGTRLNVDNR RLDDPKIYDN | 420 |
| PEVYNPYRFY DMRSEAGKDH GAQLVSTGSN HMGFGHGQHS CPGRFFAANE IKVALCHILV | 480 |
| KYDWKLCPDT ETKPDTRGMI AKSSPVTDIL IKRRESVELD LEAI | 524 |

SEQ ID NO: 234

| | |
|---|---|
| atgagcatct tcaatatgat caccagctat gcgggtagcc aacttttgcc cttctacatc | 60 |
| gccatattcg tctttacttt agtcccatgg gcaatccgct tctcttggct agaattgcgc | 120 |
| aagggctcag tggtgccact tgcgaacccg cccgactcac tgttcggcac cggtaaaacc | 180 |
| aggaggagtt ttgtcaagct tagtagagaa attctcgcta aagcgaggag cttgttccct | 240 |
| aatgagccat ttcgcttgat tacggactgg ggtgaggttc tcattctccc cccagacttt | 300 |
| gcagatgaga ttagaaatga tccgagactg agcttctcca aggcggcgat gcaggataat | 360 |
| catgctggaa tacctggctt tgagactgtt gccctggtgg gtcgtgaaga ccaacttatt | 420 |
| cagaaggtgg cccgaaagca gttgaccaag catctttccg ctgtcataga gccactatct | 480 |
| agagagtcca ccctcgcagt gtcgctcaac tttggagaga caacagaatg gcgagcgata | 540 |
| cgcctcaagc ccgcaattct agacatcatc gcccgcatct cgtccagaat ctatctcggc | 600 |
| gaccaactat gccgcaacga agcttggctg aagatcacaa agacatacac caccaacttc | 660 |
| tacactgcat ctaccaacct ccgaatgttt cctcgatcga tccgtcctct cgcccactgg | 720 |
| ttcctccccg aatgcagaaa gcttcgacag gagcgcaagg atgcaatcgg tattattacg | 780 |
| ccactgattg agcgccgccg tgagcttcga agagctgcga tcgcagctgg tcagcctctg | 840 |
| cctgtgttcc acgacgctat tgactggtcg gaacaggagg cagaagctgc aggcacaggg | 900 |
| gcctcgtttg accccgtgat cttccagctt acgctctctc ttctggcaat tcatacgacg | 960 |
| tatgatctcc tccagcaaac gatgattgac cttggtcgcc acccagagta tatcgagcct | 1020 |
| cttagacagg aagttgttca acttcttcgt gaagaaggtt ggaagaaaac aacgcttttc | 1080 |
| aagatgaagc tccttgacag tgctatcaaa gagtctcagc gaatgaagcc tggaagcata | 1140 |
| gttaccatgc gtcgctacgt aaccgaagac atcaccctct ctagcggcct gaccctcaaa | 1200 |
| aaagggaccc gcctcaacgt tgacaacaga cgcctcgacg atcccaaaat ctacgataac | 1260 |
| cccgaggttt acaatcctta tcgcttctac gacatgcgct ccgaagccgg gaaagaccat | 1320 |
| ggggcacagc tagtatcaac tggctcaaac catatgggct tcggccacgg tcagcactca | 1380 |
| tgcccagggc gtttcttcgc tgcgaatgag atcaaagtag cgctatgcca catcttggtc | 1440 |
| aagtatgatt ggaagctgtg ccctgacacg gagaccaagc ctgataccag gggcatgatt | 1500 |
| gccaagtcca gccctgtcac ggacatcttg atcaagcgtc gggagtcagt tgagttggat | 1560 |
| ttggaagcaa tttga | 1575 |

SEQ ID NO: 235

| | |
|---|---|
| MSIFNMITSY AGSQLLPFYI AIFVFTLVPW AIRFSWLELR KGSVVPLANP PDSLFGTGKT | 60 |
| RRSFVKLSRE ILAKARSLFP NEPFRLITDW GEVLILPPDF ADEIRNDPRL SFSKAAMQDN | 120 |
| HAGIPGFETV ALVGREDQLI QKVARKQLTK HLSAVIEPLS RESTLAVSLN FGETTEWRAI | 180 |
| RLKPAILDII ARISSRIYLG DQLCRNEAWL KITKTYTINF YTASTNLRMF PRSIRPLAHW | 240 |
| FLPECRKLRQ ERKDAIGIIT PLIERRRELR RAAIAAGQPL PVFHDAIDWS EQEAEAAGTG | 300 |
| ASFDPVIFQL TLSLLAIHTT YDLLQQTMID LGRHPEYIEP LRQEVVQLLR EEGWKKTTLF | 360 |
| KMKLLDSAIK ESQRMKPGSI VIMRRYVTED ITLSSGLTLK KGTRLNVDNR RLDDPKIYDN | 420 |
| PEVYNPYRFY DMRSEAGKDH GAQLVSTGSN HMGFGHGQHS CPGRFFAANE IKVALCHILV | 480 |
| KYDWKLCPDT ETKPDTRGMI AKSSPVTDIL IKRRESVELD LEAI | 524 |

SEQ ID NO: 236

| | |
|---|---|
| atgaaacaca ttgatgtgat gaacttcata tcgaaaatat gctcctggtc taaggacagc | 60 |
| ccaggattcg tccttctgat ttcaattctg gtgatactcg gcagtgtcac cttcattccc | 120 |
| aagtgtggca gaagaagcgc ctttgatgct ttgcccattg tgaacaaacc aaagtttggt | 180 |
| cccattttct caatcattgc tcgatggaga tttattcacc aaagcaagaa gatattggaa | 240 |
| gagggacaga agtgctacag caaccgcccc tttcgcatat ggacagactg gggcgaagta | 300 |
| ctcatgttga caccggatta tgcgcacgaa atacgcaatg acccgcatct cagcttttct | 360 |
| ggagctgtga aaatcgacgg ccacgcggat ataccgggct tcgagactgt gaaactgatt | 420 |
| tcgcatccag acaacctgat tcagctagta gcaaggaagc aattaaccag acaccttgcg | 480 |
| gctgtgattc agcctctttc tagtgttaca gaggaagccc tcatcaagaa tttagggaaa | 540 |
| tcacaagaat ggtctgagat ttatctaaaa tatgctgttc tagatatcat tgcccgacta | 600 |
| tcctcgcgca tttacttcgg agaactactg taccagaacg aagaatggct ttccattgta | 660 |
| aaaaattatg ccactcactt cttcactgcc agctccgatc tacgcaaagt tccttgggcc | 720 |
| tttcgctcac tagtccattg gttcgtgccg tcctgccgag cgctaaggct tgagcgctac | 780 |
| aatgcgcgtc gtgtcttaga accggttatc agccagcgtc gtcaactgaa ggaagctgcc | 840 |
| aaaacggctg gaggtacacc gttacacttc gaggatgcca ttgaatgggc cgaagtagaa | 900 |
| gctcgagtga aaggaacaaa atatgatcca gtaattttcc aattgacgct ctcgcttctg | 960 |
| gcaatacaca caacatacga tctcctcgag atgtgtatga ttgatctcgc aaagcgcccc | 1020 |
| gactgtatcg aggaccttcg taaagaagtc attacagtac tccgcaagga tggctggacg | 1080 |
| aagaatgctc tgtacaacat gaagctgctc gactctgcaa taaaagagtc tcaacgcctc | 1140 |
| aaaccaggaa gtatcacatc aatgcgtcgc tacgctactt cagacgtaca actgcgcgac | 1200 |
| ggcgtagttc tcaaaaaggg caataggctg aatgttctta ccttgcaccg atccccagac | 1260 |
| ctattccctt caccggatac ctacgaccca tatcggttct acaacatacg cggacagcct | 1320 |
| gggaaagaga actgggcgca actagtatcg acatctgttg aacatatggg ctttggtcat | 1380 |
| ggggaacact cgtgccctgg acgattcttt gcggcaaacg aaattaaggt agcacttgcg | 1440 |
| catatcctcg tcaagtacga ctggaagctg tcagacgagg cgggcggttg tactgaggtc | 1500 |
| aagggcatgg tcgaaaaggc aggaagtaag gtcaagatac tggtgagaca aaggcaagac | 1560 |
| gtggagagcg tccttgatga ggcgtga | 1587 |

SEQ ID NO: 237

| | |
|---|---|
| MKHIDVMNFI SKICSWSKDS PGFVLLISIL VILGSVTFIP KCGRRSAFDA LPIVNKPKFG | 60 |
| PIFSIIARWR FIHQSKKILE EGQKCYSNRP FRIWTDWGEV LMLTPDYAHE IRNDPHLSFS | 120 |
| GAVKIDGHAD IPGFETVKLI SHPDNLIQLV ARKQLTRHLA AVIQPLSSVT EEALIKNLGK | 180 |
| SQEWSEIYLK YAVLDIIARL SSRIYFGELL YQNEEWLSIV KNYATHFFTA SSDLRKVPWA | 240 |
| FRSLVHWFVP SCRALRLERY NARRVLEPVI SQRRQLKEAA KTAGGTPLHF EDAIEWAEVE | 300 |
| ARVKGTKYDP VIFQLTLSLL AIHTTYDLLE MCMIDLAKRP DCIEDLRKEV ITVLRKDGWT | 360 |
| KNALYNMKLL DSAIKESQRL KPGSITSMRR YATSDVQLRD GVVLKKGNRL NVLTLHRSPD | 420 |
| LFPSPDTYDP YRFYNIRGQP GKENWAQLVS TSVEHMGFGH GEHSCPGRFF AANEIKVALA | 480 |
| HILVKYDWKL SDEAGGCTEV KGMVEKAGSK VKILVRQRQD VESVLDEA | 528 |

SEQ ID NO: 238

| | |
|---|---|
| ATGAGCGAAA CATACACGAC AGCAGAAGTT GGAAAGCATA AGGACGAGGC GAATGGCTTC | 60 |
| TGGTTGATAG TTGAGAATGA CGTTTACGAC GTCACGAAGT TTATTGACGA GCACCCTGGC | 120 |
| GGTGCCAAGA TTCTAAAAAG GTGGTCTGGA AAAAACGCAA CTAAGGCATT CTGGAAGTAT | 180 |
| CATAATGAAC ACGTACTTGC TAAATACGGT AAGGACCTTA AAATAGGCGC CGTTGGCGAG | 240 |
| AGCGCGAAAC TATGA | |

SEQ ID NO: 239

| | |
|---|---|
| MSETYTTAEV GKHKDEANGF WLIVENDVYD VTKFIDEHPG GAKILKRWSG KNATKAFWKY | 60 |
| HNEHVLAKYG KDLKIGAVGE SAKL | |

SEQ ID NO: 240
ATGTTTGCTAGGAGTGCTTTCAGAGCAGCACAACCCCTTAGAAGCGTTAGGAGGTATGCCACAGAAGCGGGTGGAGCGGGTGGTAGCA
ACGCTTTCCTGTACGCTGCGGGCGCAGCCGCCTTTGGAGGAGCAGGCTATTGGTATTTCAGCAAGGGTGGTGCTCCGAGCGCTGCGGC
TGCGGCGGCCGATGTGAAACAGGCCGTTGGTATCGAACCGAAAAAAGCATTCACGGGAGGCGATCAAGGTTTCGTTAGCTTGAAACTT
TCCGATGTGGAGTTGGTAAACCACAATACAAAACGTCTTAGATTCGAGCTACCCGAGCCCGACCAAGTTAGTGGATTGCATGTGGCTT
CAGCGATTTTGACGAAGTACAAAGGGCCGAATGACGAGAAGGCAACACTAAGGCCATATACGCCCATTTCTGACGAATCCGAAAAAGG
TTTTATAGACCTACTTGTAAAGAAGTACCCCGATGGCCCCATGAGTACGCACTTACACAATCTGGTACCAGGCCAACGTCTAGATATA
AAGGGTCCGCTTCCCAAGTACCCGTGGGAGGAGAATAAGCACGAACATATTGCGCTAATAGCGGGTGGTACCGGGATTACACCAATGT
ATCAGTTGGCGAGGGCGATATTTAACAATCCAAACGACAAGACAAAGGTGACACTGGTGTTTGGTAATGTTTCCGAACAGGACATTCT
GCTAAAAAAGGAGTTCGAGCACCTAGAAAACACGTTCCCTCAGAGGTTCCGTGCATTCTACGTTCTTGATAATCCGCCTAAGGAATGG
GTTGGTAACTCTGGTTATATAAGCAAAGAGCTACTGAAAACAGTTTTGCCTGAGCCTAAGAACGAGAATATTAAACTGTTCGTGTGCG
GCCCCCCGGGCTTAATGAACGCTATCTCAGGAAACAAGGTATCACCAAAAAACCAAGGAGAACTAACCGGCGCACTAAAGGAGCTAGG
GTATAAGGAGGATCAGGTCTATAAATTTTAA
SEQ ID NO: 241
MFARSAFRAAQPLRSVRRYATEAGGAGGSNAFLYAAGAAAFGGAGYWYFSKGGAPSAAAAAADVKQAVGIEPKKAFTGGDQGFVSLKL
SDVELVNHNTKRLRFELPEPDQVSGLHVASAILTKYKGPNDEKATLRPYTPISDESEKGFIDLLVKKYPDGPMSTHLHNLVEGQRLDI
KGPLPKYPWEENKHEHIALIAGGYGITPMYQLARAIFNNPNDKTKVTLVFGNVSEQDILLKKEFEHLENTFPQRFRAFYVLDNPPKEW
VGNSGYISKELLKTVLPEPKNENIKLFVCGPPGLMNAISGNKVSPKNQGELTGALKELGYKEDQVYKF

What is claimed is:

1. A recombinant host cell, comprising:
(a) a recombinant gene encoding a first cytochrome P450 (P450) polypeptide; and/or
(b) a recombinant gene encoding a 2-oxoglutarate-dependent dioxygenase (2-ODD) polypeptide and/or a second cytochrome P450 (P450) polypeptide;
wherein the recombinant host cell is capable of producing a gibberellin precursor and/or a gibberellin compound.

2. The recombinant host cell of claim 1, wherein the gene encoding the first P450 polypeptide encodes a kaurenoic acid oxidase (KAO) polypeptide or a cytochrome P450 monooxygenase-1 (P450-1) polypeptide.

3. The recombinant host cell of claim 1 or 2, wherein the gene encoding the first P450 polypeptide comprises:
(a) a gene encoding a kaurenoic acid oxidase (KAO1) polypeptide;
(b) a gene encoding a kaurenoic acid oxidase (KAO2) polypeptide;
(c) a gene encoding a kaurenoic acid oxidase (KAO3) polypeptide;
(d) a gene encoding a kaurenoic acid oxidase (KAO4) polypeptide;
(e) a gene encoding a kaurenoic acid oxidase (KAO5) polypeptide;
(f) a gene encoding a kaurenoic acid oxidase (KAO6) polypeptide;
(g) a gene encoding a kaurenoic acid oxidase (KAO9) polypeptide;
(h) a gene encoding a kaurenoic acid oxidase (KAO10) polypeptide;
(i) a gene encoding a kaurenoic acid oxidase (KAO11) polypeptide;
(j) a gene encoding a cytochrome P450 monooxygenase-2 (P450-2) polypeptide;
(k) a gene encoding a cytochrome P450 monooxygenase-3 (P450-3) polypeptide;
(l) a gene encoding a cytochrome P-450 BJ-1 (CYP112) polypeptide; and/or
(m) a gene encoding a gibberellin A13-oxidase (GA₁₃ₒₓ) polypeptide.

4. The recombinant host cell of claim 3, wherein:
(a) the KAO1 polypeptide comprises a KAO1 polypeptide having at least 50% sequence identity to the amino acid sequence set forth in SEQ ID NO:90;
(b) the KAO2 polypeptide comprises a KAO2 polypeptide having at least 50% sequence identity to the amino acid sequence set forth in SEQ ID NO:88;
(c) the KAO3 polypeptide comprises a KAO3 polypeptide having at least 50% sequence identity to the amino acid sequence set forth in SEQ ID NO:146;
(d) the KAO4 polypeptide comprises a KAO4 polypeptide having at least 50% sequence identity to the amino acid sequence set forth in SEQ ID NO:74;
(e) the KAO5 polypeptide comprises a KAO5 polypeptide having at least 60% sequence identity to the amino acid sequence set forth in SEQ ID NO:62;
(f) the KAO6 polypeptide comprises a KAO6 polypeptide having at least 60% sequence identity to the amino acid sequence set forth in SEQ ID NO:60;
(g) the KAO9 polypeptide comprises a KAO9 polypeptide having at least 70% sequence identity to the amino acid sequence set forth in SEQ ID NO:68;
(h) the KAO10 polypeptide comprises a KAO10 polypeptide having at least 70% sequence identity to the amino acid sequence set forth in SEQ ID NO:58;
(i) the KAO11 polypeptide comprises a KAO11 polypeptide having at least 65% sequence identity to the amino acid sequence set forth in SEQ ID NO:64;
(j) the P450-2 polypeptide comprises a P450-2 polypeptide having at least 50% sequence identity to the amino acid sequence set forth in SEQ ID NO:80;
(k) the P450-3 polypeptide comprises a P450-3 polypeptide having at least 50% sequence identity to the amino acid sequence set forth in SEQ ID NO:186;
(l) the CYP112 polypeptide comprises a CYP112 polypeptide having at least 70% sequence identity to the amino acid sequence set forth in SEQ ID NOs: 4, 6, 8, 10, 124, or 128; or
(m) the GA₁₃ₒₓ polypeptide comprises a GA₁₃ₒₓ polypeptide having at least 70% sequence identity to the amino acid sequence set forth in SEQ ID NO:98.

5. The recombinant host cell of claim 1, wherein the gene encoding the second P450 polypeptide comprises:
(a) a P450-2 polypeptide having at least 50% sequence identity to the amino acid sequence set forth in SEQ ID NO:80;
(b) a P450-2 polypeptide having at least 50% sequence identity to the amino acid sequence set forth in SEQ ID NO:233;
(c) a P450-2 polypeptide having at least 50% sequence identity to the amino acid sequence set forth in SEQ ID NO 235;
(d) a P450-2 polypeptide having at least 50% sequence identity to the amino acid sequence set forth in SEQ ID NO:237;
(e) a P450-2 polypeptide having at least 50% sequence identity to the amino acid sequence set forth in SEQ ID NO:18; or
(f) a CYP112 polypeptide having at least 70% sequence identity to the amino acid sequence set forth in SEQ ID NO:124.

6. The recombinant host cell of any one of claims 1-5 wherein the gene encoding the 2-ODD polypeptide comprises:
(a) a gene encoding a desaturase (DES) polypeptide;
(b) a gene encoding a gibberellin A7-oxidase (GA₇ₒₓ) polypeptide;
(c) a gene encoding a gibberellin A3-oxidase (GA₃ₒₓ) polypeptide; or
(d) a gene encoding a gibberellin A20-oxidase (GA₂₀ₒₓ) polypeptide.

7. The recombinant host cell of claim 6, wherein:
(a) the DES polypeptide comprises a DES polypeptide having at least 50% sequence identity to the amino acid sequence set forth in SEQ ID NO:26;
(b) the GA₇ₒₓ polypeptide comprises a GA₇ₒₓ polypeptide having 60% or greater sequence identity to the amino acid sequence set forth in SEQ ID NO:152;
(c) the GA₃ₒₓ polypeptide comprises a GA₃ₒₓ polypeptide having at least 50% sequence identity to the amino acid sequence set forth in SEQ ID NO:28, SEQ ID NO:30, SEQ ID NO:36, or SEQ ID NO:44; or
(d) the GA₂₀ₒₓ polypeptide comprises a GA₂₀ₒₓ polypeptide having at least 70% sequence identity to the amino acid sequence set forth in SEQ ID NO:40 or SEQ ID NO:42.

8. A recombinant host cell, comprising:
(a) a gene encoding a kaurenoic acid oxidase (KAO4) polypeptide having at least 50% sequence identity to the amino acid sequence set forth in SEQ ID NO:74;
(b) a gene encoding a desaturase (DES) polypeptide having at least 50% sequence identity to the amino acid sequence set forth in SEQ ID NO:26;
(c) a gene encoding a cytochrome P450 monooxygenase-2 (P450-2) polypeptide having at least 50% sequence identity to the amino acid sequence set forth in SEQ ID NO:80; and
(d) a gene encoding a cytochrome P450 monooxygenase-3 (P450-3) polypeptide having at least 50% sequence identity to the amino acid sequence set forth in SEQ ID NO:186;
wherein the recombinant host cell is capable of producing a gibberellin precursor and/or a gibberellin compound.

9. A recombinant host cell, comprising:
(a) a gene encoding a kaurenoic acid oxidase (KAO4) polypeptide having at least 50% sequence identity to the amino acid sequence set forth in SEQ ID NO:74;
(b) a gene encoding a gibberellin A20-oxidase (GA₂₀ₒₓ) polypeptide having at least 50% sequence identity to the amino acid sequence set forth in SEQ ID NO:42;
(c) a gene encoding a cytochrome P450 monooxygenase-3 (P450-3) polypeptide having at least 50% sequence identity to the amino acid sequence set forth in SEQ ID NO: 186; and
(d) a gene encoding a desaturase (DES) polypeptide having at least 50% sequence identity to the amino acid sequence set forth in SEQ ID NO:26;
wherein the recombinant host cell is capable of producing a gibberellin precursor and/or a gibberellin compound.

10. A recombinant host cell, comprising a gene encoding a kaurenoic acid oxidase (KAO) polypeptide having at least 60% sequence identity to the amino acid sequence set forth in SEQ ID NO:62, SEQ ID NO:60, or SEQ ID NO:152, at least 70% sequence identity to the amino acid sequence set forth in SEQ ID NO:58 or SEQ ID NO:68, at least 65% sequence identity to the amino acid sequence set forth in SEQ ID NO:64, or at least 50% sequence identity to the amino acid sequence set forth in SEQ ID NO:74;
wherein the recombinant host cell is capable of producing gibberellin precursor and/or a gibberellin compound.

11. The recombinant host cell of claim 10, further comprising:
(a) a gene encoding a gibberellin A20-oxidase (GA₂₀ₒₓ) polypeptide having at least 70% sequence identity to the amino acid sequence set forth in SEQ ID NO:40; and
(b) a gene encoding a gibberellin A13-oxidase (GA₁₃ₒₓ) polypeptide having at least 70% sequence identity to the amino acid sequence set forth in SEQ ID NO:98.

12. A recombinant host cell, comprising:
(a) a gene encoding a kaurenoic acid oxidase (KAO11) polypeptide having at least 65% sequence identity to the amino acid sequence set forth in SEQ ID NO:64; and
(b) a gene encoding a cytochrome P-450 BJ-1 (CYP112) polypeptide having at least 70% sequence identity to the amino acid sequence set forth in SEQ ID NO:124;
wherein the recombinant host cell is capable of producing a gibberellin precursor and/or a gibberellin compound.

13. A recombinant host cell, comprising:
(a) a gene encoding a kaurenoic acid oxidase (KAO4) polypeptide having at least 50% sequence identity to the amino acid sequence set forth in SEQ ID NO:74; and
(b) a gene encoding a cytochrome P-450 BJ-1 (CYP112) polypeptide having at least 70% sequence identity to the amino acid sequence set forth in SEQ ID NO:124;
wherein the recombinant host cell is capable of producing a gibberellin precursor and/or a gibberellin compound.

14. The recombinant host cell of any one of claims 1-13, further comprising:
(a) a gene encoding a polypeptide capable of synthesizing geranylgeranyl pyrophosphate (GGPP) from farnesyl diphosphate (FPP) and isopentenyl diphosphate (IPP);
(b) a gene encoding a polypeptide capable of synthesizing ent-copalyl diphosphate from GGPP;
(c) a gene encoding a polypeptide capable of synthesizing ent-kaurene from ent-copalyl pyrophosphate;
(d) a gene encoding a bifunctional polypeptide capable of synthesizing ent-copalyl diphosphate from GGPP and synthesizing ent-kaurene from ent-copalyl pyrophosphate;
(e) a gene encoding a polypeptide capable of synthesizing ent-kaurenoic acid from ent-kaurene;
(f) a gene encoding a cytochrome B5 polypeptide;
(g) a gene encoding a polypeptide capable of reducing cytochrome B5 polypeptide;
(h) a gene encoding a polypeptide capable of reducing cytochrome P450 complex;
(i) a gene encoding a ferredoxin polypeptide;
(j) a gene encoding a ferredoxin reductase polypeptide; and/or
(k) an alcohol dehydrogenase (ADH) polypeptide capable of reducing a gibberellin intermediate.

15. The recombinant host cell of claim 14, wherein:
(a) the polypeptide capable of synthesizing geranylgeranyl pyrophosphate (GGPP) from farnesyl diphosphate (FPP) and isopentenyl diphosphate (IPP) comprises a polypeptide having at least 70% sequence identity to the amino acid sequence set forth in SEQ ID NO:50, SEQ ID NO:134, or SEQ ID NO:178;
(b) the polypeptide capable of synthesizing ent-copalyl diphosphate from GGPP comprises a polypeptide having at least 70% sequence identity to the amino acid sequence set forth in SEQ ID NO:38, SEQ ID NO:102, SEQ ID NO:104, SEQ ID NO:106, SEQ ID NO:108, or SEQ ID NO:180;
(c) the polypeptide capable of synthesizing ent-kaurene from ent-copalyl pyrophosphate comprises a polypeptide having at least 70% sequence identity to the amino acid sequence set forth in SEQ ID NO:102 or SEQ ID NO:106;
(d) the bifunctional polypeptide capable of synthesizing ent-copalyl diphosphate from GGPP and synthesizing ent-kaurene from ent-copalyl pyrophosphate comprises a CDPS-KS polypeptide having at least 70% sequence identity to the amino acid sequence set forth in SEQ ID NO:104;
(e) the polypeptide capable of synthesizing ent-kaurenoic acid from ent-kaurene comprises a polypeptide having at least 70% sequence identity to the amino acid sequence set forth in SEQ ID NO:82, SEQ ID NO:164, SEQ ID NO:170, or SEQ ID NO:172;
(f) the cytochrome B5 polypeptide comprises a cytochrome B5 polypeptide having at least 60% sequence identity to the amino acid sequence set forth in SEQ ID NO:160 or SEQ ID NO:239;
(g) the cytochrome B5 reductase polypeptide comprises a cytochrome B5 reductase polypeptide having at least 80% sequence identity to the amino acid sequence set forth in SEQ ID NO:2 or SEQ ID NO:241;
(h) the polypeptide capable of reducing cytochrome P450 complex comprises a CPR reductase polypeptide having at least 50% sequence identity to the amino acid sequence set forth in SEQ ID NO:48, SEQ ID NO:100, SEQ ID NO:140, SEQ ID NO:158, SEQ ID NO:168, SEQ ID NO:192 or SEQ ID NO:194;
(i) the ferredoxin polypeptide comprises a ferredoxin polypeptide having at least 80% sequence identity to the amino acid sequence set forth in SEQ ID NO:148;
(j) the ferredoxin reductase polypeptide comprises a ferredoxin reductase polypeptide having at least 70% sequence identity to the amino acid sequence set forth in SEQ ID NO:150; and/or
(k) the ADH polypeptide comprises an ADH polypeptide having at least 70% sequence identity to the amino acid sequence set forth in SEQ ID NO:116.

16. The recombinant host cell of any one of claims 1-15, further comprising:
(a) a gene encoding an open reading frame (ORF) polypeptide;
(b) a gene encoding an aldehyde dehydrogenase (AIdDH) polypeptide;
(c) a gene encoding a myo-inositol transport protein ITR1 (smt) polypeptide;
(d) a gene encoding an endoplasmic reticulum (ER) membrane polypeptide; and/or
(e) a gene encoding a damage resistance protein 1 (DAP) polypeptide.

17. The recombinant host cell of claim 16, wherein:
(a) the ORF polypeptide comprises an ORF polypeptide having at least 50% sequence identity to the amino acid sequence set forth in SEQ ID NO:154 or SEQ ID NO:156;
(b) the AIdDH polypeptide comprises an AIdDH polypeptide having at least 60% sequence identity to the amino acid sequence set forth in SEQ ID NO:202;
(c) the smt polypeptide comprises an smt polypeptide having at least 90% sequence identity to the amino acid sequence set forth in SEQ ID NO:209;
(d) the ER membrane polypeptide comprises an inheritance of cortical ER protein 2 (ICE2) polypeptide having at least 60% sequence identity to the amino acid sequence set forth in SEQ ID NO:206; and/or
(e) the DAP polypeptide comprises a DAP polypeptide having at least 70% sequence identity to the amino acid sequence set forth in SEQ ID NO:213, SEQ ID NO:215, SEQ ID NO:217, or SEQ ID NO:224.

18. The recombinant host cell of any one of claims 1-17, wherein expression of the genes increases the portion of the gibberellin precursor and/or the gibberellin compound produced by the recombinant host cell by at least about 10%, 25%, 50%, 75%, 80%, 90%, 95%, 100% or more.

19. The recombinant host cell of any one of claims 1-18, wherein the gibberellin compound comprises GA₁, GA₃, GA₄, GA₅, GA₇, GA₉, GA₁₂, GA₁₃, GA₁₄, GA₁₅, GA₁₉, GA₂₀, GA₂₄, GA₂₅, GA₃₆, GA₃₇, GA₄₄, GA₅₃, or GA₁₁₀.

20. The recombinant host cell of any one of claims 1-19, wherein the recombinant host comprises a plant cell, a mammalian cell, an insect cell, a fungal cell, an algal cell or a bacterial cell.

21. A method of producing a gibberellin precursor and/or a gibberellin compound in a cell culture, comprising growing the recombinant host cell of any one of claims 1-20 in a cell culture, under conditions in which the genes are expressed;
wherein the gibberellin precursor and/or the gibberellin compound is produced by the recombinant host cell.

22. The method of claim 21, further comprising isolating the gibberellin precursor and/or the gibberellin compound from the cell culture.

23. The method of claim 22, wherein the isolating step comprises:
(a) contacting the cell culture comprising the gibberellin precursor and/or the gibberellin compound with:
(i) one or more adsorbent resins in order to bind at least a portion of the gibberellin precursor and/or the gibberellin compound to the resin, thereby isolating the gibberellin precursor and/or the gibberellin compound; or
(ii) one or more ion exchange or reversed-phase chromatography columns in order to bind at least a portion of the gibberellin precursor and/or the gibberellin compound in the column, thereby isolating the gibberellin precursor and/or the gibberellin compound; or
(b) crystallizing and/or extracting the gibberellin precursor and/or the gibberellin compound from the cell culture, thereby isolating the gibberellin precursor and/or the gibberellin compound; or
(c) separating the cell culture into a solid phase and a liquid phase, wherein the liquid phase comprises the gibberellin precursor and/or the gibberellin compound; and
(i) contacting the liquid phase with one or more adsorbent resins in order to bind at least a portion of the gibberellin precursor and/or the gibberellin compound to the resin, thereby isolating the gibberellin precursor and/or the gibberellin compound;
(ii) contacting the liquid phase with one or more ion exchange or reversed-phase chromatography columns in order to bind at least a portion of the gibberellin precursor and/or the gibberellin compound in the column, thereby isolating the gibberellin precursor and/or the gibberellin compound; or
(iii) crystallizing and/or extracting the gibberellin precursor and/or the gibberellin compound from the liquid phase, thereby isolating the gibberellin precursor and/or the gibberellin compound.

24. The method of any one of claims 21-23, further comprising recovering the gibberellin precursor and/or the gibberellin compound.

25. The method of any one of claims 21-23, further comprising:
(a) one or more steps of converting kaurenoic acid to GA₁₂ and GA₁₄ catalyzed by a first P450 polypeptide; and
(b) a step of converting GA₁₄ to GA₄ catalyzed by a second P450 polypeptide.

26. The method of claim 25, wherein:
(a) the first P450 polypeptide comprises:
(i) a KAO4 polypeptide having at least 50% sequence identity to the amino acid sequence set forth in SEQ ID NO:74;
(ii) a KAO1 polypeptide having at least 50% sequence identity to the amino acid sequence set for in SEQ ID NO:90; or
(iii) a KAO3 polypeptide having at least 50% sequence identity to the amino acid sequence set for in SEQ ID NO:146; and
(b) the second P450 polypeptide comprises:
(i) a P450-2 polypeptide having at least 50% sequence identity to the amino acid sequence set forth in SEQ ID NO:80;
(ii) a P450-2 polypeptide having at least 50% sequence identity to the amino acid sequence set forth in SEQ ID NO:233;
(iii) a P450-2 polypeptide having at least 50% sequence identity to the amino acid sequence set forth in SEQ ID NO 235;
(iv) a P450-2 polypeptide having at least 50% sequence identity to the amino acid sequence set forth in SEQ ID NO:237;
(v) a P450-2 polypeptide having at least 50% sequence identity to the amino acid sequence set forth in SEQ ID NO:18; or
(vi) a CYP112 polypeptide having at least 70% sequence identity to the amino acid sequence set forth in SEQ ID NO:124.

27. The method of claim 25 or 26, further comprising a step of converting GA₄ to GA₁ catalyzed by a third P450 polypeptide.

28. The method of claim 27, wherein the third P450 polypeptide comprises:
(a) a P450-3 polypeptide having at least 50% sequence identity to the amino acid sequence set forth in SEQ ID NO:186; or
(b) a GA₁₃ₒₓ₋₁ polypeptide having at least 50% sequence identity to the amino acid sequence set forth in SEQ ID NO:98.

29. The method of any one of claims 25-28, further comprising:
(a) a step of converting GA₄ to GA₇ catalyzed by a 2-ODD polypeptide; and
(b) a step of converting GA₇ to GA₃ catalyzed by a fourth P450 polypeptide.

30. The method of claim 29, wherein:
(a) the 2-ODD polypeptide comprises a DES polypeptide having at least 50% sequence identity to the amino acid sequence set forth in SEQ IN NO:26; and
(b) the fourth P450 polypeptide comprises:
(i) a P450-3 polypeptide having at least 50% sequence identity to the amino acid sequence set forth in SEQ ID NO:186; or
(ii) a GA₁₃ₒₓ₋₁ polypeptide having at least 50% sequence identity to the amino acid sequence set forth in SEQ ID NO:98.

31. The method of any one of claims 20-26, further comprising:
(a) one or more steps of converting kaurenoic acid to GA₁₂ and/or GA₁₄ catalyzed by a first P450 polypeptide; and
(b) a step of converting GA₁₄ to GA₄ catalyzed by a 2-ODD polypeptide.

32. The method of claim 31, wherein:
(a) the first P450 polypeptide comprises a KAO4 polypeptide having at least 50% sequence identity to the amino acid sequence set forth in SEQ ID NO:74; and
(b) the 2-ODD polypeptide comprises a GA₂₀ₒₓ polypeptide having at least 70% sequence identity to the amino acid sequence set forth in SEQ ID NO:40 or SEQ ID NO:42.

33. The method of claim 31 or 32, further comprising a step of converting GA₄ to GA₁ catalyzed by a second P450 polypeptide.

34. The method of claim 33, wherein the second P450 polypeptide comprises:
(a) a P450-3 polypeptide having at least 50% sequence identity to the amino acid sequence set forth in SEQ ID NO:186; or
(b) a GA₁₃ₒₓ₋₁ polypeptide having at least 50% sequence identity to the amino acid sequence set forth in SEQ ID NO:98.

35. The method of claim 31 or 32, further comprising:
(a) a step of converting GA₄ to GA₇ catalyzed by a second 2-ODD polypeptide; and
(b) a step of converting GA₇ to GA₃ catalyzed by a second P450 polypeptide.

36. The method of claim 35, wherein:
(a) the second 2-ODD polypeptide comprises a DES polypeptide having at least 50% sequence identity to the amino acid sequence set forth in SEQ ID NO:26; and
(b) the second P450 polypeptide comprises:
(i) a P450-3 polypeptide having at least 50% sequence identity to the amino acid sequence set forth in SEQ ID NO:186; or
(ii) a GA₁₃ₒₓ₋₁ polypeptide having at least 50% sequence identity to the amino acid sequence set forth in SEQ ID NO:98.

37. The method of any one of claims 21-36, wherein the recombinant host cell is grown in a fermentor at a temperature for a period of time, wherein the temperature and period of time facilitate the production of the gibberellin precursor and/or the gibberellin compound.

38. The method of any one of claims 21-37, wherein the gibberellin compound comprises GA₃ and its precursors, metabolites, or related compounds, including: GA₁, GA₄, GA₅, GA₇, GA₉, GA₁₂, GA₁₃, GA₁₄, GA₁₅, GA₁₉, GA₂₀, GA₂₄, GA₂₅, GA₃₆, GA₃₇, GA₄₄, GA₅₃, or GA₁₁₀.

39. The method of any one of claims 21-38, wherein the recombinant host comprises a plant cell, a mammalian cell, an insect cell, a fungal cell, an algal cell or a bacterial cell.

40. A cell culture, comprising the recombinant host cell of any one of claims 1-20, the cell culture further comprising:
(a) the gibberellin precursor and/or the gibberellin compound produced by the recombinant host cell;
(b) a carbon source; and
(c) supplemental nutrients comprising trace metals, vitamins, salts, YNB, a nitrogen source, and/or amino acids;
wherein one or more gibberellin precursors and/or the gibberellin compounds are present at a concentration of at least 100 mg/liter of the cell culture.

41. A cell lysate from the recombinant host cell of any one of claims 1-20 grown in the cell culture, comprising:
(a) the gibberellin precursor and/or the gibberellin compound produced by the recombinant host cell;
(b) a carbon source; and
(c) supplemental nutrients comprising trace metals, vitamins, salts, YNB, a nitrogen source, and/or amino acids;
wherein one or more gibberellin precursors and/or the gibberellin compounds are present at a concentration of at least 100 mg/liter of the cell culture.

The application's sequence listing, which the Patent Office published only in electronic form, follows.

SEQUENCE LISTING (241 sequences)

SEQ ID NO: 1 - DNA, 945 bp, Artificial Sequence
  Codon-optimized nucleotide sequence
atgtcctctaacggtgataaccattctttgttcgccagacattacatcgattatgtttatgctccaggtttgttgttggttgtcggtactttgatcgttaagaaagaatgggctccatgggctttgttagttgctgttgtttttggtatctacaacttcatggccttccaagttaagactactttgaagccagatgttttccaagaatttgaattggaagaaaagaccatcgtcagtcataacgttgctatctacagattcaaattgccatccccaaaacacattttgggtttgccaattggtcaacacatttctattggtgctccatgtccacaaccagatggtactacaaaagaaatcgttagatcctacaccccaatctctggtgatcatcaaccaggtcatgttgatttgttgatcaagtcttacccacaaggtaacatctccaaacatatggcatctttgactgttggtcaaaccattaaggttagaggtccaaaaggtgcttttgtctacactccaaatatggttagacacttcggtatgattgctggtggtactggtattactccaatgttgcaagttattagagccatcgttagaggtagagctgctggtgataagactgaagttgatttgattttcgctaacgttaccgcccaagacatcttgttgaaagaagatttggacgctttggccaagcaagattctggtattagagttcattacgtcttggacaaacctgaagaaggttggactggtggtgttggttatgttactgctgatatgatcgataagtacttgccaaaaccagccgatgatgttaagattttgttgtgtggtccaccaccaatgatttctggtttgaaaaaagctaccgaatccttgggttttaagaaggctagaccagtttctaagttggttgaccaagttttcgctttttaa

SEQ ID NO: 2 - protein, 314 aa, Gibberella fujikuroi
MSSNGDNHSLFARHYIDYVYAPGLLLVVGTLIVKKEWAPWALLVAVVFGIYNFMAFQVKTTLKPDVFQEFELEEKTIVSHNVAIYRFKLPSPKHILGLPIGQHISIGAPCPQPDGTTKEIVRSYTPISGDHQPGHVDLLIKSYPQGNISKHMASLTVGQTIKVRGPKGAFVYTPNMVRHFGMIAGGTGITPMLQVIRAIVRGRAAGDKTEVDLIFANVTAQDILLKEDLDALAKQDSGIRVHYVLDKPEEGWTGGVGYVTADMIDKYLPKPADDVKILLCGPPPMISGLKKATESLGFKKARPVSKLVDQVFAF

SEQ ID NO: 3 - DNA, 1203 bp, Rhizobium sullae
atgtcagggcaatctctgccaacactacctatgtggcgtgttgatcatatagaaccgagtcccgaaatgttggcactgagggctaatggtccaatccatagggtaaggtttccgtctgggcacgagggttggtgggtgacaggttacgaagaggccaaggcagtgttgagcgacgccgcttttagaccatccggtatgccgccagcagcattcacacccgcaacagtcatacttggttccccaggttggttgggaagtcatgaaggttctgaacatgcaagattgagaacaattgtagctcccgcattttcaaatagacgtgtgaagctactagcacaacagatcgaagcaattgctgcacaattgtttgaaacgctagcagcacaacctcagcccgctgatctgagacattacttatcctttcctcttcctgctatggtgattagtgccttgatgggtgtaccatatgaagatcacgctttttttgcagaacttagtgacgaagttatgacccaccaacatgagtccggtcctagaagcgctgcgctactggcatggggagagttaaggacctacatcagaggcaaaatgagggggaaaagacaagacccaggagataatctacttactgacttacttgctgccgttgatcagggcaaggcaactgaggaagaagccataggtcttgctgcaggaattcttgttgcaggccacgaatcaactgttgcacaaatagaatttggtttactggctatgtccagacaccctcatcagcgtgagagattagttggagatccatctttagtcgacaaggcagtggaggaaattttacgtatgtaccctccaggcgccggatgggatggtattatgagatatcctagaactgatgtgacaatagcgggggttcatattccagctgaaagcaaagtgttagttggcttgcctgccacaagttttgatccccatcacttcgacgatcctgagaactttgatataggaagagcagaaaagcctcacttagctttttcatatggtcctcattattgcattggtgaagccttggcacgtttagaacttaaggtagtctttggttccatctttcaaagattcccgacgttgcgtttggctgtcgcacccgaagagttaaagttaagaaaggatataatcacaggaggattcgaagaattccccgtattatggtaa

SEQ ID NO: 4 - protein, 400 aa, Rhizobium sullae
MSGQSLPTLPMWRVDHIEPSPEMLALRANGPIHRVRFPSGHEGWWVTGYEEAKAVLSDAAFRPSGMPPAAFTPATVILGSPGWLGSHEGSEHARLRTIVAPAFSNRRVKLLAQQIEAIAAQLFETLAAQPQPADLRHYLSFPLPAMVISALMGVPYEDHAFFAELSDEVMTHQHESGPRSAALLAWGELRTYIRGKMRGKRQDPGDNLLTDLLAAVDQGKATEEEAIGLAAGILVAGHESTVAQIEFGLLAMSRHPHQRERLVGDPSLVDKAVEEILRMYPPGAGWDGIMRYPRTDVTIAGVHIPAESKVLVGLPATSFDPHHFDDPENFDIGRAEKPHLAFSYGPHYCIGEALARLELKVVFGSIFQRFPTLRLAVAPEELKLRKDIITGGFEEFPVLW

SEQ ID NO: 5 - DNA, 1200 bp, Rhizobium etli
atgttcgaacagcctttgccgaccttgccgatgtggagagttgatcacatcgaaccttctcctgagatgttagctctaagggctaaaggtccaatccatagagtgcgttttccttcagggcatgagggatggtgggttactggttacgacgaagctcaagcagttttatcagatgctgcctttagaccagccggtatgcctccagaaacatttacaccggattcagttattttgggtagtccaggttggcttgtatctcacgaaggaggtaaacacgcttggctaagaatgattgttgccccagcattctcaaataggagggtgaaattgttagcccaacaagtcgaggccatagctgctcaattgttcgaaacactggctgctcaaccacaaccagccgatttaagaagacacttatcatttccattgccagctatggtgatttcagcactaatgggcgttttatatgaagatcatatattcttcgccggtttatcagacgaagtcatgacccaccaacatgagtccggcccgagatctgccagcagagtcgcttgggaagagcttagaacctacatttgcagaaagatgagaggtaagagggaagagccaggtgacaatttacttaccgatttgttggcggctgtggatcatggcaaagcaactgaagaagaggcagttggtttggctgccggtgttcttgtagcaggccatgaaagtactgtagctcaaattgaatttggcctgttagctatgttcaggcacccccaacaaagggagagattggttagagacccattcctagccgataaagctgtagaggaaattttaagaatgtacagccccggcgctggttgggatggcattatgagataccctagaactgatgtcactatagctggtatggacattcccgccgaatcaaaagtcttagtgggtttacctgccacttcattcgacccaaggcacttcgaagatccggaagtatttgatataggtagggatccaaacccacacctagcgttttcctatggcccacacaattgcatcggtgcagcattggctagacttgaattaaaagtggtatttggttccatattccagagattcccggccctaaggctagctgtagctccagaagaactgaagttgagaaaagaaataattacgggcgggtttgaagaatttccagtcctatgg

SEQ ID NO: 6 - protein, 400 aa, Rhizobium etli
MFEQPLPTLPMWRVDHIEPSPEMLALRAKGPIHRVRFPSGHEGWWVTGYDEAQAVLSDAAFRPAGMPPETFTPDSVILGSPGWLVSHEGGKHAWLRMIVAPAFSNRRVKLLAQQVEAIAAQLFETLAAQPQPADLRRHLSFPLPAMVISALMGVLYEDHIFFAGLSDEVMTHQHESGPRSASRVAWEELRTYICRKMRGKREEPGDNLLTDLLAAVDHGKATEEEAVGLAAGVLVAGHESTVAQIEFGLLAMFRHPQQRERLVRDPFLADKAVEEILRMYSPGAGWDGIMRYPRTDVTIAGMDIPAESKVLVGLPATSFDPRHFEDPEVFDIGRDPNPHLAFSYGPHNCIGAALARLELKVVFGSIFQRFPALRLAVAPEELKLRKEIITGGFEEFPVLW

SEQ ID NO: 7 - DNA, 1203 bp, Microvirga lupini
atgtctgaacaaccactaccgacccttccaatgtggagagtagaccacattgaaccgagtcccgaaatgttggcccttagagctaatggacccatccatagagtgagattcccatccggacacgaaggctggtgggtcactggatatgatgaagccaaggctgtcttaagtgatactgcgttcagaccagccggaatgccaccagctgcttttactccggatagcgttatccttggcagtccgggttggttagtttcacacgaaggaggtgagcatacaagattaaggaccatagtcgcccctgcgtttggtgattcaagaatcaaattgttagcacagcaagtcgaggccattgcagcacaactttttaaaactttatccacacagcctcaaccagctgacttaagacgtcatctttcctttcctttaccagccatggttatatcagccttgatgggtgttcgttacgaagatcatgcttttttcgcaggtctgtcagatgaagtaatgactcaccagcatgaatccggacccaggagcgccagtcgtcttgcatgggaagaattgagagcatatataagagatcgtatgcgtgaaaagagacaggatccaggtgataacctgctgactgatttattggcggcggtggatcaaggtaaagcaagtgaagaagaagctattggactggcagctggcatgttagttgctgggcatgagagcacagcagctcaaatagaatgtggtctattagcgatgtttagacatccacagcaaagagaaaggcttgttgctgacccaagtttattagataaaaccgtcgaggaaattttaagaatgtacccacctggggctggttgggatgggattatgagataccctagaacagatgtgactatcgctggtgtacacatccctgctgaatctaaagtccttgtgggattacctgctacctcttttgatccgaggcagtttgatgatcctgagatatttgacatcggtagagacgagaaacctcatctggctttttcctacggtccgcactattgcatcggcggtgcattggctagattggaattgaaggcagttttcggatctattttccaaagatttcctggtttaagattagcagttgctccagaagaattacgtctgagaaaagagattattacaggcggatttgaggagatgccagtgctgtggtaa

SEQ ID NO: 8 - protein, 400 aa, Microvirga lupini
MSEQPLPTLPMWRVDHIEPSPEMLALRANGPIHRVRFPSGHEGWWVTGYDEAKAVLSDTAFRPAGMPPAAFTPDSVILGSPGWLVSHEGGEHTRLRTIVAPAFGDSRIKLLAQQVEAIAAQLFKTLSTQPQPADLRRHLSFPLPAMVISALMGVRYEDHAFFAGLSDEVMTHQHESGPRSASRLAWEELRAYIRDRMREKRQDPGDNLLTDLLAAVDQGKASEEEAIGLAAGMLVAGHESTAAQIECGLLAMFRHPQQRERLVADPSLLDKTVEEILRMYPPGAGWDGIMRYPRTDVTIAGVHIPAESKVLVGLPATSFDPRQFDDPEIFDIGRDEKPHLAFSYGPHYCIGGALARLELKAVFGSIFQRFPGLRLAVAPEELRLRKEIITGGFEEMPVLW

SEQ ID NO: 9 - DNA, 1203 bp, Sinorhizobium meliloti
atgagcgaacagcctttacctatgttgcccatgtggagagtagatcacatcgagccatcacccgaaatgttagcactgagagcaaaagggcctatacaccgtgttagatttccgtctggtgatgaaggttggtgggtgaccggttacgacgaagcaaaagcggtgttatcagatgctgcgtttaggcccagcggtatgccccctgcagctgtgactagtgctacagtcatattgggttcaccgggctggttggggagccatgagggttctgaacacgctagactgagaaccatcgtagcccctgccttttcttcaggtagagtcaaattgttagcacaacaagtggaagccattgcagctgagttattcgaaaccttggcggcccaaccacagccagcagacctgagaagacacttgagttttccgcttcccgctatggtgatttctgccttaatgggcgtgctgtatgaagaccatgcctttttcgcccgtttgagtgataaagtaatgacccatcaatatgaaagtggtcctcgttcagcggcacgtttggcgtgggaggagttaagagcatatattagaggcaagatgcgtgataagagacaagaccccggagacaacttgctaaccgatttgcttgcagcagtggatcaaggtaaagcaacggaagaggaagcaataggattggcagcaggtatgttggtcgcaggacatgaaaccacagtggcgcagattgaattcggtctattggctatgtttaggcatccacagcaaagagagagattagttggcgacccgagtttggtcgataaggcagtagaggagattttgagaatgtatcctcctggtgccggatgggatggtattatgaggtatccaagaacagacgtcactattgcaggagtacatatcccagccgagagcaaggtcctggttggtttgccggctacatcctttgatcccagacattttgacgatccagaaatttttgatgtgggaagagaggaaaaacctcatctagccttctcatatggaccacattactgcatcggagtggagttggcacgtttggaattgagagttgtctttggttcaatattccagagatttccagcgcttagactggcggtggccccagaggaattgaaattgagaaaggccatcattactggcggttttgaagcttttcccgttttatggtga

SEQ ID NO: 10 - protein, 400 aa, Sinorhizobium meliloti
MSEQPLPMLPMWRVDHIEPSPEMLALRAKGPIHRVRFPSGDEGWWVTGYDEAKAVLSDAAFRPSGMPPAAVTSATVILGSPGWLGSHEGSEHARLRTIVAPAFSSGRVKLLAQQVEAIAAELFETLAAQPQPADLRRHLSFPLPAMVISALMGVLYEDHAFFARLSDKVMTHQYESGPRSAARLAWEELRAYIRGKMRDKRQDPGDNLLTDLLAAVDQGKATEEEAIGLAAGMLVAGHETTVAQIEFGLLAMFRHPQQRERLVGDPSLVDKAVEEILRMYPPGAGWDGIMRYPRTDVTIAGVHIPAESKVLVGLPATSFDPRHFDDPEIFDVGREEKPHLAFSYGPHYCIGVELARLELRVVFGSIFQRFPALRLAVAPEELKLRKAIITGGFEAFPVLW

SEQ ID NO: 11 - DNA, 2157 bp, Ustilaginoidea virens
atggcggaattagatacgttagatatcgttgttttaggcgctttattgttgggcacattagcgtattttacgaagggcacattatggggtgtcactaaggatccttatgcaaacgctttcgcaaatgctaacggagctaaagccggcagatcaagaaatatcgttgaaaaaatggatgaatctggtaaaaactgcgtcatattctacggttctcaaactggaacggcagaggattacgcatcaagattagcgaaagaaggaaagtcaagattcgggttagggactatggttgcagatttagaagaatatgattatgataaccttgatacaatgagcggcgataaggttgccatgtttgttcttgctacctatggcgagggcgaaccaactgacaacgcagtagagttttatgaatttattactggtgaaggggttgcttttagtgaaggaaacgatccccccttaggcaatctgaactacgtggcctttggactggggaacaatacttatgaacactacaattcaatggtcagaaatgtcgataaagcccttaggaatctgggtgctcataggatcggagaggctggtgaaggcgatgacggtgctggcacaatggaagaagattttctagcatggaaggaaccaatgtgggccgccttagctgacaaaatgggtttggaggaaagggaagcagtatatgaccctgtgttcagtatcgttgatcgtgataatttgactcctgaaagcccagaagtctatttgggtgaacctaataaaatgcatttagaggatgcggtcaagggcccatttaattctcataatccatatatagcaccaatagctgaatctagagaattgtttagtgttaaagacaggaattgcatccatatggaaattgacatagacggttcaaatttgagctatcaaactggggatcatgtggctatttggcctaccaacccaggagatgaagtggatagatttttagacatcattgatttaaaggataaacgtgacaaggttataggagtgaaagcacttgaaccaactgcaaaggtcccttttccaacaccaacaacatatgacgttatcgccaggtatcatttagaaatctgtgcaccggtctctagacagtttgtgtccactctagcagcattctccccaaatgatgaggtaaaagcagaaatgactagattgggtaacgataaggattattttcatgataagacgggcccacattattataatatcgcccgttttctagctgcggttggtaagggcgagaaatggtcaaatatccctttttctgtttttgtcgaaggtttaacgaaattacaaccaagatattattcaatctcctcttcaagcctagtacaaccaaaaaaaatatcaataacggcagtaattgagtcacaggttatacctgccaggcaagatccatttagaggtgtagctacgaactacttatttgcattgaaacagaagcaaaacggtgatccaaatccctccccatttggacatacttatgcattaaacggccctagaaataaatttgacggtatacacgtccccgtccacgtaaggcactccaatttcaaactaccgagcgatccagcaaaaccagttattatggttggtccaggaactggagtggctccgtttagaggtttcatccaagagagagctaaacaggcccaggatggggccacagtaggccgtactatcttgttcttcggttgccaacgtaggtccgaagattttttgtacgaaagtgaatggaaagaatacaaggaagttctaggagatacccttgagatagtcactgccttctccagggaaacatcaaagaaagtttatgtgcagcacaggttgaaagagagatccaaagaaatcggagaactattatcacagaaagcatacttttatgtgtgtggcgatgctgctcatatggctagagaagttaatactgtattggctcaaattatcgctgaatctaggggtgtaagtgaagccaagggtgaagagattgttaaaaatatgagggctgctaatcagtaccaagttaggagggggaacaatgtctttttttgggctataagtggttctattgatatgacggccaataccgccaacttacaagaagatgtgtggagctga

SEQ ID NO: 12 - protein, 718 aa, Ustilaginoidea virens
MAELDTLDIVVLGALLLGTLAYFTKGTLWGVTKDPYANAFANANGAKAGRSRNIVEKMDESGKNCVIFYGSQTGTAEDYASRLAKEGKSRFGLGTMVADLEEYDYDNLDTMSGDKVAMFVLATYGEGEPTDNAVEFYEFITGEGVAFSEGNDPPLGNLNYVAFGLGNNTYEHYNSMVRNVDKALRNLGAHRIGEAGEGDDGAGTMEEDFLAWKEPMWAALADKMGLEEREAVYDPVFSIVDRDNLTPESPEVYLGEPNKMHLEDAVKGPFNSHNPYIAPIAESRELFSVKDRNCIHMEIDIDGSNLSYQTGDHVAIWPTNPGDEVDRFLDIIDLKDKRDKVIGVKALEPTAKVPFPTPTTYDVIARYHLEICAPVSRQFVSTLAAFSPNDEVKAEMTRLGNDKDYFHDKTGPHYYNIARFLAAVGKGEKWSNIPFSVFVEGLTKLQPRYYSISSSSLVQPKKISITAVIESQVIPARQDPFRGVATNYLFALKQKQNGDPNPSPFGHTYALNGPRNKFDGIHVPVHVRHSNFKLPSDPAKPVIMVGPGTGVAPFRGFIQERAKQAQDGATVGRTILFFGCQRRSEDFLYESEWKEYKEVLGDTLEIVTAFSRETSKKVYVQHRLKERSKEIGELLSQKAYFYVCGDAAHMAREVNTVLAQIIAESRGVSEAKGEEIVKNMRAANQYQVRRGNNVFFWAISGSIDMTANTANLQEDVWS

SEQ ID NO: 13 - DNA, 1614 bp, Ustilaginoidea virens
atggcaaccttggttcacgtgggtcactttggtagacccttgtgttcaggacaagctttgcctttgcttctagccggaatcttggcggcagccttagcaatcaaagctgcggcgtggtgcgctcgtaaacgtcatctagcagaaattccattggccaacccaccttcatggttatttttctctagacctgctgaaagagtagctttggttaggagtgctgctgaagcattgctgcgtgctagagacgatttcccacatggaccttttcgttttctaagtgactggggtgaacttctaatcttgcctcctgagttcgccgaagaaataagaaatgaacctaaactatcttttgggctagctgcaatgagagataatcatgcgaatatacctggttttgaaactgttagaattgtcggtagagatgatcaacttttacaagctgttgctagaaaacatctaacaaaacacttggccaaggccatcgaaccattgtgcgcggaagcaagcctggctctagcagttaatctaggtgagtcaccagactggcaaacagttagattgcaacctgccgtgctggatattattgcaaggctatccagtagagtgtatctgggtgagcaattgtgtagatctcaggactggttggctgttacaaagacttatgccacagcgttttatgctgcatcatccaaattgagaatgtttccaagagctctacgtccattggtacattggtggatgccagagtgtcgtagactaagagctcaacgtagggcagccgaagccattatccgtcctttggttaggcgtagacaacaagctaaacaagcggcagcagccgccgggcatccagcccccgtgtttcatgatgcccttgagtgggctgaacaggaggctgcaacagctgccgctgcggccgcagctgggaggtctagatcttgtgatccagttgtatttcaattggcactgtccttgctagcaattcacacaacatatgatcttctgcagcaagcaatgactgatctagcttctaatccacaatacataggtcctttaagagatgaagtcgcaagagttgttgggcaagacgggtggagtaaagcttctttgtataagatgaagcttttggatagtgcccttaaggaaactcaaaggttaaaacccggttctattgttaccatgaggcgtgttgctactgatgatgttgctttgtcatccggtcttgtgttgaaaaaaggtaccagggttaacgtcgataataggagaatgactgacgcggcagtttatgccgatcctagagtttacaacccctggagattttatcaaatgaggctgcaacccggtaaagaacatgtagctcaattggtttctacctccccagatcacttgggatttggccacggcttgcattcatgtcctggtaggttcttcgctgcgaatgaagttaaggtagctttgggtcatatgttgttaaagtatgactggaagcttgctcctgcgacggacaagacaccagattgtagaggaatgttggcaaaagctagcccaactactgatgtgatgatcaggaggagacatgacgaggctgatacaggcgctgcagcaagagaatag

SEQ ID NO: 14 - protein, 537 aa, Ustilaginoidea virens
MATLVHVGHFGRPLCSGQALPLLLAGILAAALAIKAAAWCARKRHLAEIPLANPPSWLFFSRPAERVALVRSAAEALLRARDDFPHGPFRFLSDWGELLILPPEFAEEIRNEPKLSFGLAAMRDNHANIPGFETVRIVGRDDQLLQAVARKHLTKHLAKAIEPLCAEASLALAVNLGESPDWQTVRLQPAVLDIIARLSSRVYLGEQLCRSQDWLAVTKTYATAFYAASSKLRMFPRALRPLVHWWMPECRRLRAQRRAAEAIIRPLVRRRQQAKQAAAAAGHPAPVFHDALEWAEQEAATAAAAAAAGRSRSCDPVVFQLALSLLAIHTTYDLLQQAMTDLASNPQYIGPLRDEVARVVGQDGWSKASLYKMKLLDSALKETQRLKPGSIVTMRRVATDDVALSSGLVLKKGTRVNVDNRRMTDAAVYADPRVYNPWRFYQMRLQPGKEHVAQLVSTSPDHLGFGHGLHSCPGRFFAANEVKVALGHMLLKYDWKLAPATDKTPDCRGMLAKASPTTDVMIRRRHDEADTGAAARE

SEQ ID NO: 15 - DNA, 996 bp, Cucumis sativus
atggtcaacaaagaagaaatcaccattccaaccgctgatttgtctccattcttgaaagaattggaccagggttcttattcctacgatgatgatgatgacgaccaaaagaaaaaaaaggctgccgccattgaaattattggtaaggcttgttctgagttcggtttcttccaagttgttaatcatggtgttccattgcacttgatgcaaaaggctttgttgttgtctaatcagttcttcggttacccattggacagaaaattgcaagcttctccattgccaggtgctccaatgccagctggttatggtagacaaccagatcattctccagataagaacgagttctttatgatgttcccaccacattctaccttcaacgtttttccatctcatccacaaggtttcagagaagttgttgaagagttgttctcttgcttcgttaagaccgcttctgttatcgaaaacatcatcaacgaatgtttgggtttgcctccaaatttcttgtctgagtacaacaacgatagaaagtgggatttgatgtccactttcagatacccaaacgcctctgaaattgaaaacgttggtttgagagaacacaaggacgttaacttcattaccttgttgttccaagatgaagtcggtggtttggaagttaagactgaagatcatcaatggatcccaattatcccaaaccagaacaccttggttattaacgttggtgatgttatccaggtcttgtccaatgatagatacaagtctgcttcccacagagttgttagacaagaaggtagagaaagacactcttacgctttcttctacaatatcggtggtgataagttggttcaaccattgccacatttcaccacccatattgatcaaccaccaaactacaagtccttcatctacaaagaatacttgcagttgaggttgagaaacaagactcatccaccatcaaacccacaagatatcatcaacatctcttactactctaccacttaa

SEQ ID NO: 16 - protein, 331 aa, Cucumis sativus
MVNKEEITIPTADLSPFLKELDQGSYSYDDDDDDQKKKKAAAIEIIGKACSEFGFFQVVNHGVPLHLMQKALLLSNQFFGYPLDRKLQASPLPGAPMPAGYGRQPDHSPDKNEFFMMFPPHSTFNVFPSHPQGFREVVEELFSCFVKTASVIENIINECLGLPPNFLSEYNNDRKWDLMSTFRYPNASEIENVGLREHKDVNFITLLFQDEVGGLEVKTEDHQWIPIIPNQNTLVINVGDVIQVLSNDRYKSASHRVVRQEGRERHSYAFFYNIGGDKLVQPLPHFTTHIDQPPNYKSFIYKEYLQLRLRNKTHPPSNPQDIINISYYSTT

SEQ ID NO: 17 - DNA, 1560 bp, Fusarium oxysporum
atgatcacctcctacgcaggttcccaacttttatctttttatgtcacaatatttatctttacattagtaccttgggctataagattgttctggccaaaacttagaaagggcagtgtcgttccattggctaatccacctgagagcttgttcggtaccggtaaaacaaggcgtagctttgtaaaattaagccgtgaaattttagctaaagcaaggaacttattcccagacgaaccttttagactgattactgactggggcgaggtgcttatccttcctccggagttcgctgatgagatccgtaatgatccgcgtctgtcattttcaaaggctgccatgcaggataatcacgcaggtattcctggcttcgaaaccgttgcgcttgtgggtagagaagaccagctgatacaaaaggtggctaggaaacaattgacgaaacatcttagtgccgttattgaaccattgagtagagaatcaactctggcagtcagtttaaacttcggggaatcaactgaatggcgtagtatcagattaaaacccgcaattctggatattatcgctagaatctccagcagaatttatttgggcgatcaattgtgtagaaatgaagcatggttaaaaattactaaaacctatactacaaacttttacacagccagcacaaaccttagaatgttcccgagaccaattagacctcttgcccattggttcttgcctgagtgtagaaaactaagacaagagagaaaggacgctgtcggtatcattactccattgatagagaggcgtcgtgagttacgtagagctgcagtcgcagctggtcaacctctacccgtttttcacgatgcaattgactggagtgaacaggaggccgaggcggcgggcagtgggtccgcatttgatcctgttatttttcaattgacactttctttgctagccatccacaccacctatgacctacttcaacaaactatgatagacttgggaagacacccagaatacattgatcccctacgtcaagaagtcgttcaattgttaagggaagaaggttggaaaaaaaccactctgttcaaaatgaaattgctggattctgctatcaaagaaagtcagagaatgaaaccggggagtattgttactatgagaaggtatgtcactgaagatataaccttatcatccggattaacacttcataaaggcactagattaaacgttgataacaggagactagatgacccaagaatctacgaaaatccggaagtctataatccatatcgtttttatgatatgaggtccgaagcttctaaggaccatggtgcacagttggtaagtactggtagtaaccatatgggttttgggcatggacaacattcttgtcccggtagatttttcgcagctaacgagattaaagtagcgttgtgccatatacttgtaaaatatgattggaaattatgtccaaatactgagacgaaacctgatacaaggggtatgattgctaaatctagtcctgtcacggatattctaattaagagaagggaaagcgtggaattggatttagaagcaatgtaa

SEQ ID NO: 18 - protein, 331 aa, Fusarium oxysporum; identical to SEQ ID NO: 16

SEQ ID NO: 19 - DNA, 996 bp, Fusarium avenaceum
atgtctccaactcaatctactactactccagctacaaaaccagttatggcttctattccatattactccggtccttttaatccaccagataccatttctgctgtttccactaagagatactgtgattggagatccgttaacatcaacgatgttagatcttccactaaggatttcaccttggataagaatggtttccagtacatgaagcactcttcagctttatcttctccaccacatactttggcttcatggaaagataacgaaaccagaaagagagttaacgacgccgaaattttggaattgggtaaagctgttactggtgccaaaaaggttttggttgttttggctattggtagagatgctgcttttactgatccattggatcaaacttctagaccagatgtctacggtaatcaaactgatactttgccagctactagacagttgggtttttatggtggtgctaatattggtccagctagaaaacctcatgttgattggggtccagatggtgttagatctattttgagaaactggtcccatgaattggctgatgaagccaaggatattattgatgctgaagatgaagccatctctttgccaggtggtattgaagaaaattacaagggtagaagatggggcttgtataatacttggaggccattgaaaccagtcagaagagatccattggcttgtgttgatttcgtgtcctctaagaatgataagtccgccattttgttgagaaagatcccaggtattcatggtccatgtactgttgatgctttgtttactccagctaatccaaaacatgaatggtactggatgtctgatcaacaaccagatgatatcttgttcatgaagatcttcgattccgctcacgaaagagatccaaaaactattgctggtggtgttcatcactgttcttttcatcatccaggtactgaagatgaggaagtcagagaatctttggagactaagtttatggctttctggtaa

SEQ ID NO: 20 - protein, 331 aa, Fusarium avenaceum
MSPTQSTTTPATKPVMASIPYYSGPFNPPDTISAVSTKRYCDWRSVNINDVRSSTKDFTLDKNGFQYMKHSSALSSPPHTLASWKDNETRKRVNDAEILELGKAVTGAKKVLVVLAIGRDAAFTDPLDQTSRPDVYGNQTDTLPATRQLGFYGGANIGPARKPHVDWGPDGVRSILRNWSHELADEAKDIIDAEDEAISLPGGIEENYKGRRWGLYNTWRPLKPVRRDPLACVDFVSSKNDKSAILLRKIPGIHGPCTVDALFTPANPKHEWYWMSDQQPDDILFMKIFDSAHERDPKTIAGGVHHCSFHHPGTEDEEVRESLETKFMAFW

SEQ ID NO: 21 - DNA, 1029 bp, Fusarium proliferatum
atgccacataaggatactccattggaatctccagttggtaagaatgttactgctaccattgcttatcattctggtccagctttgccaacttctccaattgctggtgttactactttacaagattgcacccaacaagttgttgccgttactgatattagaccatccgtttcttcattcaccttggatggtaatggtttccaagttgtcaaacatgcttctgctgttggttctcctccttacaatcattcttcttggactgatccagtcgtcagaaaagaagtttacgatccagaaattatcgaattggccaagtctttgactggtgccaaaaaggttatgattttgttggcctcttctaggaacgtcccttttaaagaaccagaattggctccaccatatccaatgccaggtaaatctaattccggttctaaagaaggtggcgctaatccagctaatgaattgccaactactagagctaagggtttccaaaaaggtgaagaagaaggtccagttagaaaaccacacaaagattggggtccatctggtgcttggaatactttgagaaattggtcccaagaattgatcgatgaagccggtgatattatcaaagctggtgatgaagctgctaaattgccaggtggtagagctaagaattatcaaggtagaagatgggccttgtatacaacttggaggccattgaaaccagttaagagggatccaatggcttatgttgattattggactgctgatggtgaagatggtgtttcattttggagaaatccaccaggtgttcatggtacttttgaatccgatgttttgttgactaaggctaacccaaaacataagtggtactggatttctgatcaaaccccagatgaagtcttgttgatgaagattatggacaccgaatctgaaaaggatggttctggtattgctggtggtgttcatcactgttcttttcatttgccaggtactgaaaaagaagaggtcagagaatccatcgaaactaagtttattgccttctggtaa

SEQ ID NO: 22 - protein, 342 aa, Fusarium proliferatum
MPHKDTPLESPVGKNVTATIAYHSGPALPTSPIAGVTTLQDCTQQVVAVTDIRPSVSSFTLDGNGFQVVKHASAVGSPPYNHSSWTDPVVRKEVYDPEIIELAKSLTGAKKVMILLASSRNVPFKEPELAPPYPMPGKSNSGSKEGGANPANELPTTRAKGFQKGEEEGPVRKPHKDWGPSGAWNTLRNWSQELIDEAGDIIKAGDEAAKLPGGRAKNYQGRRWALYTTWRPLKPVKRDPMAYVDYWTADGEDGVSFWRNPPGVHGTFESDVLLTKANPKHKWYWISDQTPDEVLLMKIMDTESEKDGSGIAGGVHHCSFHLPGTEKEEVRESIETKFIAFW

SEQ ID NO: 23 - DNA, 1032 bp, Fusarium verticillioides
atgccacatcaacaaactccattggaatctccagttggtaagaatgttactgctaccattgcttaccataatggtccagctttgccaacttctccaattgctggtgttactactttggaagattgcacccaacatgttgttgctgttactgatattagaccatccgtttcttcattcaccttggatggtaatggtttccaagttgttaagcacgtttccgaagtttcttctcctccatacaatcattcttcatggactgatccagtcgtcagaaaagaagtttacgatccagaaattatcgaattggccaagtctgttactggtgccaaaaaggttatgattttgttggcttctgctaggaacgtcccttttaaagaaccagaattggctccaccatatccaatgccatctaaaggtggtaaagaaggtggcgctggtcaaactgttcaaggtcaacatgaattgccaactactagagctaagggttttcaaaagggtgaagaagaaggtccagttagaaaaccacataaggattggggtccatctggtgcttggaatactttgttgaattggtcccaagaattgatcgatgaagccgatgatattatcaaggctggtgatgaagctgctgaattgccaggtggtagagctaagaattatcaaggtagaagatgggccttgtatacaacttggaggccattgaaaccagttaagagggatccaatggcttttgttgattattggactgctgatgaagaggacggtgtttcattttggagaaatccaccaggtgttcatggtacttttgaatccgatgttttgttgactagagctaacccaaaacataagtggtactggatttctgatcaaaccccagatgaagtcttgttgatgaagattatggacaccgaatctgaaaaggacggttctgatattgctggtggtgttcattactgttctttccatttgccagtctccgaaaaagaagaagtcagagaatccatcgaaacgaagtttattgctttctggtaa

SEQ ID NO: 24 - protein, 343 aa, Fusarium verticillioides
MPHQQTPLESPVGKNVTATIAYHNGPALPTSPIAGVTTLEDCTQHVVAVTDIRPSVSSFTLDGNGFQVVKHVSEVSSPPYNHSSWTDPVVRKEVYDPEIIELAKSVTGAKKVMILLASARNVPFKEPELAPPYPMPSKGGKEGGAGQTVQGQHELPTTRAKGFQKGEEEGPVRKPHKDWGPSGAWNTLLNWSQELIDEADDIIKAGDEAAELPGGRAKNYQGRRWALYTTWRPLKPVKRDPMAFVDYWTADEEDGVSFWRNPPGVHGTFESDVLLTRANPKHKWYWISDQTPDEVLLMKIMDTESEKDGSDIAGGVHYCSFHLPVSEKEEVRESIETKFIAFW

SEQ ID NO: 25 - DNA, 1029 bp, Gibberella fujikuroi
atgccacacaaggataacttgttggaatctccagttggtaaatctgttactgctaccattgcttatcattctggtccagctttgccaacttctccaattgctggtgttactactttacaagattgcacccaacaagctgttgctgttactgatattagaccatccgtttcttcattcaccttggatggtaatggtttccaagttgttaagcacacttctgctgttggttcacctccatatgatcattcttcatggactgatccagtcgtcagaaaagaagtttacgatccagaaattatcgaattggccaagtctttgactggtgccaaaaaggttatgattttgttggcctcttctaggaacgtcccttttaaagaaccagaattggctccaccatatccaatgccaggtaaatcttcttcaggttccaaagaaagagaagctattccagctaatgaattgccaactactagagctaagggtttccaaaaaggtgaagaagaaggtccagttagaaagccacataaggattggggtccatctggtgcttggaatactttgagaaattggtcccaagaattgatcgatgaagccggtgatattatcaaagctggtgatgaagctgctaaattgccaggtggtagagctaagaattatcaaggtagaagatgggccttgtatacaacttggaggccattgaaaactgttaagagggatccaatggcttacgttgattattggactgctgatgaagaggatggtgtttcattttggagaaatccaccaggtgttcatggtacttttgaatccgatgttttgttgactaaggctaacccaaaacataagtggtactggatttctgatcaaaccccagatgaagtcttgttgatgaagattatggacaccgaatctgaaaaggacggttctgaaattgctggtggtgttcatcactgttcttttcatttgccaggtactgaaaaagaagaggtcagagaatccatcgaaactaagtttattgccttctggtaa

SEQ ID NO: 26 - protein, 342 aa, Gibberella fujikuroi
MPHKDNLLESPVGKSVTATIAYHSGPALPTSPIAGVTTLQDCTQQAVAVTDIRPSVSSFTLDGNGFQVVKHTSAVGSPPYDHSSWTDPVVRKEVYDPEIIELAKSLTGAKKVMILLASSRNVPFKEPELAPPYPMPGKSSSGSKEREAIPANELPTTRAKGFQKGEEEGPVRKPHKDWGPSGAWNTLRNWSQELIDEAGDIIKAGDEAAKLPGGRAKNYQGRRWALYTTWRPLKTVKRDPMAYVDYWTADEEDGVSFWRNPPGVHGTFESDVLLTKANPKHKWYWISDQTPDEVLLMKIMDTESEKDGSEIAGGVHHCSFHLPGTEKEEVRESIETKFIAFW

SEQ ID NO: 27 - DNA, 1065 bp, Marah macrocarpa
atggccgatcaagaaattactactgctccaccatcttctccattggttccattggatttttcttcatctcacgaaaccgttccagaatcccatatttgggttgattccattgaattgtctccagctatggatttggacgagaaattgtctttgccagttatcgatttgttggatgataccactgcctctgaattgattggtaaagcttgtcaacaatggggtatgttccaattgattaaccatggtgttccaaagtccattattgccgaaactgaagatgaagctagaaggttgtttgctttgccaactactcaaaagatgaagacttttggtccaggtaatactggttatggtatggttccattgtccaagtaccattctaaatccatgtggcatgaaggtttcaccatttttggttctccattggatgatgctaaaaagttgtggccatctgactacaagagattctgtgatgttatggaagaataccaaagaaagatgaagggtttggccgatagattgatgagattgatcttgaagttcttggacatctccgaagaagagatcatgaagttgatgttcactccagaggattcctctaaaatctacactgctttgaggttgaacttgtatccaccatgtccagatccagatagagttgttggtatggcttctcatactgatacttcattcttcaccattatccaccaagctagaaatgatggcttgcaaatctttaaggatgaagctggttgggttccattatctccaacatctggtactttgatggttaacgttggtgacttgttgcagattttgtctaatggtagattcccatccatcttgcacagagttatgatccaagaaaagatggaagataggttgtccttggcttacttttacactccaccaccacatatctatattgctccatactgtaagccattgtccgaatctccacaaatcccattatacagatgtgtcaccgtcaaagaatactccacttctaagtctaacaacaacttcaagggtttgtctaccgtcaagatctcctctttgatttga

SEQ ID NO: 28 - protein, 354 aa, Marah macrocarpa
MADQEITTAPPSSPLVPLDFSSSHETVPESHIWVDSIELSPAMDLDEKLSLPVIDLLDDTTASELIGKACQQWGMFQLINHGVPKSIIAETEDEARRLFALPTTQKMKTFGPGNTGYGMVPLSKYHSKSMWHEGFTIFGSPLDDAKKLWPSDYKRFCDVMEEYQRKMKGLADRLMRLILKFLDISEEEIMKLMFTPEDSSKIYTALRLNLYPPCPDPDRVVGMASHTDTSFFTIIHQARNDGLQIFKDEAGWVPLSPTSGTLMVNVGDLLQILSNGRFPSILHRVMIQEKMEDRLSLAYFYTPPPHIYIAPYCKPLSESPQIPLYRCVTVKEYSTSKSNNNFKGLSTVKISSLI

SEQ ID NO: 29 - DNA, 1068 bp, Vitis vinifera
atggcttctaccttgtctcaagttttcagagataatccattgccattgaaccacatcatcccattggattttacctctgttcattccttgccagaatctcatgtttggccagcttttgatggttttccatttggtactacttacccaggtgaaaagttctccattccaatcatcgatttgatggatccaaatgctgctcaattggttggtcatgcttgtgaaaaatggggtgcttttcaattgacttctcatggtttgccatccatcttgactgatgatgttgaatctcaaaccagaaggttgtttgctttgccagctcacgaaaaaatgaaggctttgagattgccatctggtggtactggttatggtcaagctagaatttctccattctacccaaagttcatgtggcatgaaggtttcactattatgggttctgctgttgatcatgctagaaaattgtggccagatgattacaagggtttctgtgatgttatggaagattaccaaaagaagatgaaggaattggccgaatccttgttgcatatcttcttggaatccttggacatctccaaagaagagtacagatctaccactattcaaagaggtcataaggcttgtaataccgccttgcaattgaattcttatccaccatgtccagatccaaatagagctatgggtttggctccacatactgattctttgttgttcaccatcgttcatcaatctcacacctccggtttacaaattttgagagatggtgttggttggatcactgtttttccattggaaggtgctttggttgttaacgttggtgatttgttgcacatcttgtctaatggtagatacccatctgttttacacagagccgttgttaatcaagccgaacacagaatttctttggcttacttttatggtccaccagccgattctttgatttctccattgtgtaacttggtttcttccggtcaacaagttgttgctccaagatatagatccgtgtctgtcaaagaatacgtcgatttgaaagagaagcacaaagaaaaggccttgtccttgttgagattgtga

SEQ ID NO: 30 - protein, 355 aa, Vitis vinifera
MASTLSQVFRDNPLPLNHIIPLDFTSVHSLPESHVWPAFDGFPFGTTYPGEKFSIPIIDLMDPNAAQLVGHACEKWGAFQLTSHGLPSILTDDVESQTRRLFALPAHEKMKALRLPSGGTGYGQARISPFYPKFMWHEGFTIMGSAVDHARKLWPDDYKGFCDVMEDYQKKMKELAESLLHIFLESLDISKEEYRSTTIQRGHKACNTALQLNSYPPCPDPNRAMGLAPHTDSLLFTIVHQSHTSGLQILRDGVGWITVFPLEGALVVNVGDLLHILSNGRYPSVLHRAVVNQAEHRISLAYFYGPPADSLISPLCNLVSSGQQVVAPRYRSVSVKEYVDLKEKHKEKALSLLRL

SEQ ID NO: 31 - DNA, 1119 bp, Oryza sativa
atgtccatggttgtccaacaagaacaagaagttgtttttgacgctgctgttttgtctggtcaaactgaaattccatcccaattcatttggccagctgaagaatctccaggttctgttgctgttgaagaattggaagttgccttgattgatgttggtgctggtgctgaaagatcttctgttgttagacaagttggtgaagcttgtgaaagacacggttttttcttggttgttaaccatggtattgaagccgctttgttggaagaggctcatagatgtatggatgcttttttcactttgccattgggtgaaaaacaaagagcacagagaagggctggtgaatcttgtggttatgcttcatcttttactggtagattcgcttctaagttgccatggaaagaaactttgtccttcagatattcttccgctggtgatgaagaaggtgaagagggcgttggtgaatatttggttagaaaattgggtgccgaacacggtagaagattgggtgaagtttattctagatactgccacgaaatgtccaggttgtctttggaattgatggaagttttgggtgagtctttgggtatagttggtgatagaaggcattacttcagaagattcttccagagaaacgactccatcatgagattgaattattacccagcttgccaaagaccattggatactttgggtactggtccacattgtgatccaacatctttgactatcttgcaccaagatcatgttggtggtttggaagtttgggctgagggaaggtggagagctattagaccaagaccaggtgctttggttgttaatgttggtgatactttcatggctttgtccaacgctagatatagatcttgcttgcatagagccgttgttaattctactgctccaagaagatctttggcattctttttgtgtccagaaatggataccgttgttagaccacctgaagaattggttgatgatcaccatccaagagtttacccagattttacttggagagctttgttggatttcacccaaagacattacagagctgatatgaggttgttccaagctttttctgattggttgaaccatcatagacacttgcaacctactatctactcctga

SEQ ID NO: 32 - protein, 372 aa, Oryza sativa
MSMVVQQEQEVVFDAAVLSGQTEIPSQFIWPAEESPGSVAVEELEVALIDVGAGAERSSVVRQVGEACERHGFFLVVNHGIEAALLEEAHRCMDAFFTLPLGEKQRAQRRAGESCGYASSFTGRFASKLPWKETLSFRYSSAGDEEGEEGVGEYLVRKLGAEHGRRLGEVYSRYCHEMSRLSLELMEVLGESLGIVGDRRHYFRRFFQRNDSIMRLNYYPACQRPLDTLGTGPHCDPTSLTILHQDHVGGLEVWAEGRWRAIRPRPGALVVNVGDTFMALSNARYRSCLHRAVVNSTAPRRSLAFFLCPEMDTVVRPPEELVDDHHPRVYPDFTWRALLDFTQRHYRADMRLFQAFSDWLNHHRHLQPTIYS

SEQ ID NO: 33 - DNA, 1134 bp, Vitis vinifera
atggattcttccgcttctaccattttgatgccaccaccattggaattgaaagacgaaagaaaaaagggctccgttgttttcgattcctctaagatgcaaaagcaagaaaagttgccaaccgaattcatttggccagatgctgatttggttagagcacaacaagaattgaacgaaccattgatcgatttggacggttttttcaaaggtgatgaagctgctactgctcatgctgctgaattgattagaatggcttgtttgaaccacggtttcttccaagttactaatcacggtgttgatttggatttgattagagctgctcaagaagatatgggcgcttttttcaaattgccattgtccagaaagttgtccgtcaaaaaaaagccaggtgaattgtctggttattctggtgctcatgctgatagatacacttctaaattgccatggaaagaaaccttgtccttcgtttactgttacgactctggttctaaacctatggttgctgattacttcaaaaccgctttgggtgaagatttcgaacaaattggttggatctaccaaaagtactgcgacgctttgaaagaattgtccttgggtatcatgcagttgttggctatttctttggatgtcgactcttcctactacagaaagttgtttgaagatggttactccatcatgaggtgtaattcttacccaccatgtaaagaagctggtttggttatgggtactggtccacattgtgatccagttgctttgaccattttacaccaagatcaagtcaagggtttggaagttttcgttgataacaaatggcaatccgttaagccaagaccaggtgctttggttgttaatattggtgatactttcatggccttgtctaacggcaagtacaagtcttgtattcatagagccgttgtcaacatggacaaagaaagaagatctttgaccttcttcatgtccccaaaggatgataaggttgtttctccaccacaagaattgatcgttagagaaggtcctagaaagtacccagattttaagtggtctgagttgttggaattcacccaaaaacattacagaccaaacaacgacaccttgcaatcttttgttgagtggagattatcttcccagaccaagtaa

SEQ ID NO: 34 - protein, 377 aa, Vitis vinifera
MDSSASTILMPPPLELKDERKKGSVVFDSSKMQKQEKLPTEFIWPDADLVRAQQELNEPLIDLDGFFKGDEAATAHAAELIRMACLNHGFFQVTNHGVDLDLIRAAQEDMGAFFKLPLSRKLSVKKKPGELSGYSGAHADRYTSKLPWKETLSFVYCYDSGSKPMVADYFKTALGEDFEQIGWIYQKYCDALKELSLGIMQLLAISLDVDSSYYRKLFEDGYSIMRCNSYPPCKEAGLVMGTGPHCDPVALTILHQDQVKGLEVFVDNKWQSVKPRPGALVVNIGDTFMALSNGKYKSCIHRAVVNMDKERRSLTFFMSPKDDKVVSPPQELIVREGPRKYPDFKWSELLEFTQKHYRPNNDTLQSFVEWRLSSQTK

SEQ ID NO: 35 - DNA, 1134 bp, Cucurbita maxima
atggctactactattgccgacgtttttaagtctttcccagttcatattccagcccacaagaatttggatttcgattccttgcatgaattgccagattcttacgcttggattcaaccagattcttttccatctccaactcataagcaccacaactccattttggattccgattctgattccgttccattgatcgatttgtctttgccaaatgctgctgctttgattggtaatgcttttagatcttggggtgccttccaagttattaaccatggtgttccaatttctttgttgcaatccattgaatcctctgccgatactttgttttctttgccaccatctcataagttgaaggctgctagaactccagatggtatttctggttatggtttggtcagaatctcttcattcttcccaaaaaggatgtggtctgaaggttttactatagtcggttctccattggatcacttcagacaattgtggccacatgattaccacaaacattgcgaaatcgttgaagaatacgacagggaaatgagatctttgtgtggtagattgatgtggttgggtttgggtgaattgggtattactagagatgatatgaagtgggctggtccagatggtgattttaagacttctccagctgctactcaattcaactcttatccagtttgtccagatccagatagagctatgggtttgggtccacatactgatacttcattattgaccatcgtctaccagtctaacaccagaggtttacaagttttgagagaaggtaagagatgggttactgttgaaccagttgctggtggtttggttgttcaagttggtgatttgttgcatattttgaccaatggcttgtacccatctgctttacatcaagctgttgttaacagaaccagaaagagattgtctgttgcttacgtttttggtccaccagaatctgctgaaatttctccattgaaaaagttgttgggtccaactcaaccaccattatacagaccagttacttggactgaatacttgggtaaaaaggccgaacatttcaacaacgctttgtctactgttagattgtgtgctccaattaccggtttgttggatgttaacgatcactccagagttaaggttggttga

SEQ ID NO: 36 - protein, 377 aa, Cucurbita maxima
MATTIADVFKSFPVHIPAHKNLDFDSLHELPDSYAWIQPDSFPSPTHKHHNSILDSDSDSVPLIDLSLPNAAALIGNAFRSWGAFQVINHGVPISLLQSIESSADTLFSLPPSHKLKAARTPDGISGYGLVRISSFFPKRMWSEGFTIVGSPLDHFRQLWPHDYHKHCEIVEEYDREMRSLCGRLMWLGLGELGITRDDMKWAGPDGDFKTSPAATQFNSYPVCPDPDRAMGLGPHTDTSLLTIVYQSNTRGLQVLREGKRWVTVEPVAGGLVVQVGDLLHILTNGLYPSALHQAVVNRTRKRLSVAYVFGPPESAEISPLKKLLGPTQPPLYRPVTWTEYLGKKAEHFNNALSTVRLCAPITGLLDVNDHSRVKVG

SEQ ID NO: 37-38 - skipped (2 entries)

SEQ ID NO: 39 - DNA, 1137 bp, Cucurbita maxima
atgcacgttgttacttctacacctgaagctagacatgatggtgcacctttggtttttgatgcttctgttttgagacaccaacacaacattccaaagcaattcatttggccagatgaagaaaaaccagctgctacttgtccagaattggaagttccattgattgacttgtctggtttcttgtctggtgaaaaagatgctgctgctgaagctgttagattggttggtgaagcttgtgaaaaacacggttttttcttggttgttaaccacggtgttgacagaaagttgattggtgaagctcataagtacatggacgaattctttgagttgccattgtcccaaaaacaatccgctcaaagaaaagctggtgaacattgtggttacgcttcatcttttactggtaggttctcttctaaattgccatggaaagaaaccttgtcctttagatttgctgccgacgaatctttgaacaacttggtcttgcattacttgaacgataagttgggtgatcaattcgctaagttcggtagagtttaccaagattactgtgaagctatgtccggtttgtctttgggtatcatggaattgctaggtaagtctttgggtgttgaagaacaatgcttcaagaacttcttcaaggacaacgactccatcatgagattgaatttttacccaccatgccaaaagccacatttgactttgggtactggtccacattgtgatccaacatctttgactatcttgcaccaagatcaagtcggtggtttacaagtttttgttgataaccagtggagattgatcaccccaaattttgatgctttcgttgttaacatcggtgatacctttatggctttgtctaacggtagatacaagtcctgcttgcatagagctgttgttaactctgaaagaacgagaaagtctttggcattcttcttgtgtccaagaaacgataaggttgttagaccaccaagagaattggttgatactcaaaacccaagaagatacccagatttcacttggtctatgttgttgagattcacccaaactcattacagagctgatatgaagactttggaagctttttctgcttggttgcaacaagaacaacaagagcagcaagaacaacagttcaacatctga

SEQ ID NO: 40 - protein, 378 aa, Cucurbita maxima
MHVVTSTPEARHDGAPLVFDASVLRHQHNIPKQFIWPDEEKPAATCPELEVPLIDLSGFLSGEKDAAAEAVRLVGEACEKHGFFLVVNHGVDRKLIGEAHKYMDEFFELPLSQKQSAQRKAGEHCGYASSFTGRFSSKLPWKETLSFRFAADESLNNLVLHYLNDKLGDQFAKFGRVYQDYCEAMSGLSLGIMELLGKSLGVEEQCFKNFFKDNDSIMRLNFYPPCQKPHLTLGTGPHCDPTSLTILHQDQVGGLQVFVDNQWRLITPNFDAFVVNIGDTFMALSNGRYKSCLHRAVVNSERTRKSLAFFLCPRNDKVVRPPRELVDTQNPRRYPDFTWSMLLRFTQTHYRADMKTLEAFSAWLQQEQQEQQEQQFNI

SEQ ID NO: 41 - DNA, 1143 bp, Arabidopsis thaliana
atggctaccgaatgtattgctactgttccacaaatcttctccgagaacaagaccaaagaagattcctctattttcgacgccaagttgttgaatcaacattcccatcatatcccacaacaattcgtttggccagatcacgaaaaaccatctactgatgttcaaccattgcaagttccattgattgatttggctggtttcttgtctggtgattcttgtttggcttctgaagctactagattggtttctaaagctgctaccaaacacggctttttcttgattactaatcacggtgttgacgaatccttgttgtctagagcttacttgcatatggactcatttttcaaagctccagcttgcgaaaaacaaaaggctcaaagaaaatggggtgaatcttctggttacgcttcttcatttgttggcagattctcttctaaattgccatggaaagaaaccttgtccttcaagttttctccagaagaaaagatccattcccaaaccgttaaggacttcgtgtctaaaaagatgggtgatggttacgaagatttcggtaaggtttatcaagaatacgctgaagctatgaacaccttgtccttgaagatcatggaattgctaggtatgtctttgggtgtcgaaagaaggtacttcaaagaattcttcgaggactccgattccatcttcagattgaattattacccacaatgcaagcaaccagaattggctttgggtactggtccacattgtgatccaacatctttgactatcttgcaccaagatcaagtcggtggtttacaagttttcgttgataacaagtggcaatccattccaccaaatccacatgctttcgttgttaacattggtgatactttcatggctttgaccaacggtagatacaaatcttgcttgcatagagccgttgtcaactctgaaagagaaagaaagactttcgcattcttcttgtgtccaaagggtgaaaaagttgttaagccacctgaagaattggttaacggtgttaagtctggtgaaagaaagtacccagatttcacttggtctatgttcttggaattcacccaaaaacattacagagccgacatgaacactttggacgaattttctatttggttgaagaacagaagatccttttaa

SEQ ID NO: 42 - protein, 380 aa, Arabidopsis thaliana
MATECIATVPQIFSENKTKEDSSIFDAKLLNQHSHHIPQQFVWPDHEKPSTDVQPLQVPLIDLAGFLSGDSCLASEATRLVSKAATKHGFFLITNHGVDESLLSRAYLHMDSFFKAPACEKQKAQRKWGESSGYASSFVGRFSSKLPWKETLSFKFSPEEKIHSQTVKDFVSKKMGDGYEDFGKVYQEYAEAMNTLSLKIMELLGMSLGVERRYFKEFFEDSDSIFRLNYYPQCKQPELALGTGPHCDPTSLTILHQDQVGGLQVFVDNKWQSIPPNPHAFVVNIGDTFMALTNGRYKSCLHRAVVNSERERKTFAFFLCPKGEKVVKPPEELVNGVKSGERKYPDFTWSMFLEFTQKHYRADMNTLDEFSIWLKNRRSF

SEQ ID NO: 43 - DNA, 1149 bp, Spinacia oleracea
atgccatctagaccatcaagagtcgtcaaagaacaacatccaactaagaagtccttcttggacttggaatctttgaacgaattgccagattcttttgcttggggttcttttgaagatccatgctctattgataacccatctggttatggtccagattctgttccagttatcaacttgcaagatccacaagctcaacaattggttggtttggcttgtagatcttggggtgttttccaagttaccaaccatggtattcaaaagtccttgttggatgatattgaagctgctggtaagtctttgtttgccttgccagttaatcaaaagttgaaggctgctagatcttcttgtggtgttactggttacggtccagctggtatttcttcatttttcccaaaaaggatgtggtccgaaggtttcactattttgggttctccattggatcatgctagacaattgtggccaaacaactacaacaagttctgcgatatcatcgaaaagtaccaaaaagaaatgaaccagttggccaaaaagttgatgcaattggttgttggttccttgggtatttccaaccaggatattatgaattgggccgatttgttggaaggtgctaatggtgctatgcaattgaactcttatccaatcagaccagatccaaatagagctatgggtttggctgctcatactgattctactttgttgaccatcttgcaccaatctaacactaccggtttacaggttttcagagaaagatctggttgggttactgttccaccaatttctggtggtttggttattaacatcggtgacttgttgcacatcttgtctaatggtagatacccatccgtttaccatagagccatggttaatagagttcagcacagattgtctgttgcttacttgtatggtccagcttcaggtgttagagttcaaccattgccaaaattgattgatgctactcacccaccattatacagaccagttacttggtctgaatacttgggtatcaagtctgaacatttgaccaaggccttgtccttgattagaatcaaccataacactaacccatccttgactggtttgattggtaatgatgaacctaagtccatcaacgttgactccgataagactattttggctgttttcggttaa

SEQ ID NO: 44 - protein, 382 aa, Spinacia oleracea
MPSRPSRVVKEQHPTKKSFLDLESLNELPDSFAWGSFEDPCSIDNPSGYGPDSVPVINLQDPQAQQLVGLACRSWGVFQVTNHGIQKSLLDDIEAAGKSLFALPVNQKLKAARSSCGVTGYGPAGISSFFPKRMWSEGFTILGSPLDHARQLWPNNYNKFCDIIEKYQKEMNQLAKKLMQLVVGSLGISNQDIMNWADLLEGANGAMQLNSYPIRPDPNRAMGLAAHTDSTLLTILHQSNTTGLQVFRERSGWVTVPPISGGLVINIGDLLHILSNGRYPSVYHRAMVNRVQHRLSVAYLYGPASGVRVQPLPKLIDATHPPLYRPVTWSEYLGIKSEHLTKALSLIRINHNTNPSLTGLIGNDEPKSINVDSDKTILAVFG

SEQ ID NO: 45 - DNA, 1167 bp, Gibberella fujikuroi
atgaagtacaccacctgtcagatgaacatttttccatctttgtggtccatgaagaccagttttagatggccaagaacttctaagtggtcctctgtttcattatacgacatgatgttgagaaccgttgctttgttgtctggtagagcttttgttggtttgccattgtgtagagatgaaggttggttgcaagcttctattggttacactgttcaatgcgtgtctatcagagatcagttgtttacttggtccccagttttgaggccaattattggtccatttttgccatccgttagatctgttagaaggcatttgagattcgctgctgaaattatggctccattgatttctcaagccttgcaagacgaaaaacaacatagagctgataccttgttggctgatcaaactgaaggtagaggtactttcatttcctggttgttgagacatttgccagaagaattgagaaccccagaacaagttggtttggatcaaatgttggtttcctttgctgctattcataccactactatggctttgacaaaggttgtttgggaattggtaaaaaggccagagtacattgaaccattgagaaccgaaatgcaagatgtttttggtccagatgctgtttctccagatatctgcattaacaaagaagccttgtccagattgcacaagttggattctttcatcagagaagttcaaagatggtgtccatctactttcgttactccatctagaagagtcatgaagtctatgactttgtccaacggtatcaagttgcaaagaggtacttctattgcttttccagctcatgccattcacatgtctgaagaaactccaacattttccccagatttctcttccgattttgaaaacccatccccaagaattttcgacggttttagatacttgaacttgaggtccattaagggtcaaggttcacaacatcaagctgctactactggtccagattacttgattttcaatcatggtaaacatgcctgcccaggtagattttttgctatctctgaaatcaagatgattttgatcgagttgttggccaagtacgacttcagattggaagatggtaaaccaggtccagaattgatgagagttggtactgaaactagattggataccaaagctggtttggaaatgagaagaaggtga

SEQ ID NO: 46 - protein, 388 aa, Gibberella fujikuroi
MKYTTCQMNIFPSLWSMKTSFRWPRTSKWSSVSLYDMMLRTVALLSGRAFVGLPLCRDEGWLQASIGYTVQCVSIRDQLFTWSPVLRPIIGPFLPSVRSVRRHLRFAAEIMAPLISQALQDEKQHRADTLLADQTEGRGTFISWLLRHLPEELRTPEQVGLDQMLVSFAAIHTTTMALTKVVWELVKRPEYIEPLRTEMQDVFGPDAVSPDICINKEALSRLHKLDSFIREVQRWCPSTFVTPSRRVMKSMTLSNGIKLQRGTSIAFPAHAIHMSEETPTFSPDFSSDFENPSPRIFDGFRYLNLRSIKGQGSQHQAATTGPDYLIFNHGKHACPGRFFAISEIKMILIELLAKYDFRLEDGKPGPELMRVGTETRLDTKAGLEMRRR

SEQ ID NO: 47 - DNA, 2142 bp, Gibberella fujikuroi
atggccgaattggataccttggatatcgttgttttgggtgttatcttcttgggtactgttgcttacttcaccaaaggtaaattgtggggtgttactaaggatccatacgctaatggttttgctgctggtggtgcttctaaaccaggtagaactagaaatatcgttgaagccatggaagaatctggtaagaactgtgttgttttctacggttctcaaactggtactgctgaagattatgcttccagattggctaaagaaggtaagagtagattcggtttgaacaccatgattgccgatttggaagattacgatttcgataacttggataccgtcccatctgataacatcgttatgtttgttttggctacctacggtgaaggtgaacctactgataatgctgttgacttctacgaattcattaccggtgaagatgcttctttcaacgaaggtaatgatccaccattgggtaacttgaattacgttgcttttggtttgggtaacaacacctacgaacattacaactccatggttagaaacgtcaacaaggctttggaaaaattgggtgctcatagaattggtgaagctggtgaaggtgatgatggtgctggtactatggaagaagattttttggcttggaaagacccaatgtgggaagccttggctaaaaagatgggtttggaagaaagagaagctgtctacgaacctattttcgccattaacgaaagagatgatttgacccctgaagccaatgaagtttatttgggtgaacctaacaagttgcacttggaaggtactgctaaaggtccattcaattctcacaacccatatattgctccaatcgccgaatcttacgaattattctctgctaaggatagaaactgcttgcacatggaaattgacatctctggttctaatttgaagtacgaaaccggtgatcatattgccatttggccaactaatccaggtgaagaagttaacaagttcttggacatcttggacttgtccggtaaacaacattctgttgttactgttaaggccttggaacctacagctaaagttccttttccaaatccaactacctacgatgccattttgagataccatttggaaatttgcgctccagtctctagacaattcgtttctactttggctgcttttgctccaaacgatgatattaaggctgaaatgaacagattgggttccgataaggattacttccacgaaaaaactggtccacactactacaacattgctagatttttggcctctgtctctaaaggtgaaaagtggactaagattccattctccgctttcattgaaggtttgactaagttgcaacctagatattactccatctcctcctcatctttggttcaacctaagaagatctctattaccgccgttgttgaatcccaacaaattccaggtagagatgatccttttagaggtgttgctaccaattacttgttcgccttgaaacaaaagcaaaacggtgatccaaatcctgctccatttggtcaatcttatgaattgactggtccaagaaacaagtacgatggtattcatgttccagttcacgttagacactctaactttaagttgccatctgatccaggtaagccaattatcatgattggtccaggtactggtgttgctccattcagaggttttgttcaagaaagagctaagcaagctagagatggtgttgaagttggtaaaaccttgttgttcttcggttgtagaaagtccactgaagatttcatgtaccaaaaagaatggcaagaatacaaagaagccttaggtgacaagttcgaaatgattactgccttctcaagagaaggttctaagaaggtttacgtccaacacagattgaaagaaagatccaaagaagtctccgatttgttgtctcaaaaggcctacttttacgtttgtggtgatgctgctcatatggccagagaagttaatactgttttggcccaaattatcgctgaaggtagaggtgtatctgaagctaagggtgaagaaatcgttaagaacatgagatccgccaatcaataccaagtttgctctgattttgttaccttgcactgtaaagaaaccacctacgctaattccgaattgcaagaagatgtttggtcctaa

SEQ ID NO: 48 - protein, 713 aa, Gibberella fujikuroi
MAELDTLDIVVLGVIFLGTVAYFTKGKLWGVTKDPYANGFAAGGASKPGRTRNIVEAMEESGKNCVVFYGSQTGTAEDYASRLAKEGKSRFGLNTMIADLEDYDFDNLDTVPSDNIVMFVLATYGEGEPTDNAVDFYEFITGEDASFNEGNDPPLGNLNYVAFGLGNNTYEHYNSMVRNVNKALEKLGAHRIGEAGEGDDGAGTMEEDFLAWKDPMWEALAKKMGLEEREAVYEPIFAINERDDLTPEANEVYLGEPNKLHLEGTAKGPFNSHNPYIAPIAESYELFSAKDRNCLHMEIDISGSNLKYETGDHIAIWPTNPGEEVNKFLDILDLSGKQHSVVTVKALEPTAKVPFPNPTTYDAILRYHLEICAPVSRQFVSTLAAFAPNDDIKAEMNRLGSDKDYFHEKTGPHYYNIARFLASVSKGEKWTKIPFSAFIEGLTKLQPRYYSISSSSLVQPKKISITAVVESQQIPGRDDPFRGVATNYLFALKQKQNGDPNPAPFGQSYELTGPRNKYDGIHVPVHVRHSNFKLPSDPGKPIIMIGPGTGVAPFRGFVQERAKQARDGVEVGKTLLFFGCRKSTEDFMYQKEWQEYKEALGDKFEMITAFSREGSKKVYVQHRLKERSKEVSDLLSQKAYFYVCGDAAHMAREVNTVLAQIIAEGRGVSEAKGEEIVKNMRSANQYQVCSDFVTLHCKETTYANSELQEDVWS

SEQ ID NO: 49 - DNA, 1182 bp, Fusarium proliferatum
atggccgaacaacaaatctccaacttgttgtctatgttcaacgccttccataccaatcagaagttggaaatctctgttcaagttaccgattccttccagtatagagatactcctccagattcttcatcttctgaaggtggttctttgtccagatacgaagaaagaagagtttctttgccattggctagaaattctccatctccagatatcgttttccagttgtgtttttctaccgccaccatttctgaattgaaccatagatggaagtcccagagattgaaagttgctgattctccatacaactacatcttgactttgccatccaaaggtattagaggtgccttcattgattctttgaacgtttggttggatgttccagaagataaggcccaagttatcaaggatgttatcgatatgttgcacaactcctcattgatcatcgatgactttcaagatggttccccattgagaagaggtaaaccatctactcatactgtttttggtccagctcaagctattaacactgctacctacattatcgttaaggccatcgaaagaatccaagagatcgtttctcatgatgctttggctgatattaccggtactattaccactatctttcaaggtcaagctatggatttgtggtggactgctaacaccatattgcaatccattcaagaatacttgttgatggtcaacgataagactggtgctttgttcagattgtctttggaattattggccttgaactccgaagctccaatttctgattctaccttggaatccttgtcctccgttgtttctttgttgggtcaatacttccaaatcagggatgactacatgaacttgatcgataacaagtacaccgaccaaaagggtttctgtgaagatttggatgagggcaaatactccttgactttgattcatgctttacaaaccgactcctccgatttgttgattaacgttttgtccatgagaagagtccaaggtaaattgactacccaacaaaagatgttggtcttggaagttatgaagaccaacggttctttggattggacttctaagttgttgggtatgttgcatacaagagttgttgccgaaatcgactccttggaaatttctatgaagagagataacccagctttgagagctttggttgaaagattgaagccagaaacctga

SEQ ID NO: 50 - protein, 393 aa, Fusarium proliferatum
MAEQQISNLLSMFNAFHTNQKLEISVQVTDSFQYRDTPPDSSSSEGGSLSRYEERRVSLPLARNSPSPDIVFQLCFSTATISELNHRWKSQRLKVADSPYNYILTLPSKGIRGAFIDSLNVWLDVPEDKAQVIKDVIDMLHNSSLIIDDFQDGSPLRRGKPSTHTVFGPAQAINTATYIIVKAIERIQEIVSHDALADITGTITTIFQGQAMDLWWTANTILQSIQEYLLMVNDKTGALFRLSLELLALNSEAPISDSTLESLSSVVSLLGQYFQIRDDYMNLIDNKYTDQKGFCEDLDEGKYSLTLIHALQTDSSDLLINVLSMRRVQGKLTTQQKMLVLEVMKTNGSLDWTSKLLGMLHTRVVAEIDSLEISMKRDNPALRALVERLKPET

SEQ ID NO: 51 - DNA, 1221 bp, Bradyrhizobium japonicum
atgaagggtttggttgttgttggtgcttcttatgctggtgttcaagctgctttgactgctagagatgctggttttgctaaacctattgctatcgttggtgatgaaccatgtttgccatatcaaagaccaccattgtctaaggattacttgttggataacgcctccgaacaatctttgttcttgagagataatgctttcttcggtgccaagggtattgaattgattttgggttccagagttatcgacatcgatttgagagatagaagggccattttggaaagaggttctgttttgggtttcgagcaattggttattgctgctggttctagagctagaagattggaagttccaggtggtcatttggaaggtgtttgttatttgagatccttgtctgatgctgcccatttgaaaatgagattgaagcaagctgaagatgtcgttattattggtggtggtttcatcggtttggaagttgctgcttctgctacaaaattgggtaagaaggttgttttgattgaagccggtcacagattattggaaagagctacttctccagttgtctcctcttttttgttggatgctcatttgagagccggtgttgaaattagattgctagaaactgttgctgctttcgaaggtgctagaggtaaattgtctactgtcttgttatcctccggttccaaagttagagctgatatggttgttgtaggtattggtggtattgccaatgatgaattggctagaaaagctggtttgaactgtactaatggtgttaccgtttctgctcatggtatgactgatgttgatggtgtttttgcttgtggtgattgtgcttaccatttcaacagattctctaagacttggaccagattggaatctgttcaaaacgctcaagatcaagctaaagctgctggtttggctattgctggtaaacattctccagatatctctgttccaagattctggtctgatcaattcgacttgaagttgcaaactactggtattgctggttcttttgatgctgctgttgttagaggtactgttgatactggtagattctctaccttctacttcaaggatggttgtttgttggctgttgactctattaacagaccaggtgatcaattggttgccagaagattgattgcagctggtgtttctccatctcaaggtgaagctgctgatatttctttcgacttgaaatctttggtcactccataa

SEQ ID NO: 52 - protein, 406 aa, Bradyrhizobium japonicum
MKGLVVVGASYAGVQAALTARDAGFAKPIAIVGDEPCLPYQRPPLSKDYLLDNASEQSLFLRDNAFFGAKGIELILGSRVIDIDLRDRRAILERGSVLGFEQLVIAAGSRARRLEVPGGHLEGVCYLRSLSDAAHLKMRLKQAEDVVIIGGGFIGLEVAASATKLGKKVVLIEAGHRLLERATSPVVSSFLLDAHLRAGVEIRLLETVAAFEGARGKLSTVLLSSGSKVRADMVVVGIGGIANDELARKAGLNCTNGVTVSAHGMTDVDGVFACGDCAYHFNRFSKTWTRLESVQNAQDQAKAAGLAIAGKHSPDISVPRFWSDQFDLKLQTTGIAGSFDAAVVRGTVDTGRFSTFYFKDGCLLAVDSINRPGDQLVARRLIAAGVSPSQGEAADISFDLKSLVTP

SEQ ID NO: 53 - DNA, 1233 bp, Sinorhizobium arboris
atgagagtcgaaaaccacaacagagatgttatcggtgtttctgttgctccaactcacttggataatttgtcatctgctatcttgcaacaaggtggtatggctagagtttctttgccaggtgatgttgttacttgggctgctggtggtcatcaaactttgagaagaattttgtccgaccagagattcaacagagattggagacagtggagagctttacaagatggtgaaattccagaagatcatccattgattggtatgtgcaaggttgataacatggttactgctcatggtgctgatcatagaagattgagaggtttgttgtctagatctttcccaccatctagaattgctttgttggctccaagaattgaacaatgggttgatagattattggccgaaatggctcaaagaggtggttctgctgatttgatgtgtgaatttgctgttccattgcctaccaatgttattgctgaattattcggtttgccagacgaacagagagaagaaatagttgctttgacttactctttggctaacacttctgctactgctgctgaagttagacaaaccagacaaagaattccagagttcttcagaagattgatcgctttgaaaaggggtcaattgggtgatgatttggcttctgctttgatagttgctagagataacggtgaattggtttccgataccgaattgatcgatatgttgttcatggttttgtccgctggtttcgttactactactggtgttattggtaatggtgttttggctttgttgacccatccacaacaattgcatttggttagagctggtcaagttccatggtcacaagctattgaagaaattttgagatggggttcctctgttgctaatttgccttttagatacgctaccgaagatgttgaaattgatggttgcatggttagaagaggtgatgctgttttgatggcttttcatgctgctaatagagatgagaaagcttttggtccaggtgctgatagatttgatgttactagaaggcataacccacacttgtcttttggtgaaggtccacatttttgtttgggtgctgctttggctagattggaattgagatgtgcttttccagctttgtttgccagattggaagatttggctttgactattgctgctgaagatgttgtttacatgccatcctacgttattagatgcccacaaagattgccagttactttcagaccatctattgcctga

SEQ ID NO: 54 - protein, 410 aa, Sinorhizobium arboris
MRVENHNRDVIGVSVAPTHLDNLSSAILQQGGMARVSLPGDVVTWAAGGHQTLRRILSDQRFNRDWRQWRALQDGEIPEDHPLIGMCKVDNMVTAHGADHRRLRGLLSRSFPPSRIALLAPRIEQWVDRLLAEMAQRGGSADLMCEFAVPLPTNVIAELFGLPDEQREEIVALTYSLANTSATAAEVRQTRQRIPEFFRRLIALKRGQLGDDLASALIVARDNGELVSDTELIDMLFMVLSAGFVTTTGVIGNGVLALLTHPQQLHLVRAGQVPWSQAIEEILRWGSSVANLPFRYATEDVEIDGCMVRRGDAVLMAFHAANRDEKAFGPGADRFDVTRRHNPHLSFGEGPHFCLGAALARLELRCAFPALFARLEDLALTIAAEDVVYMPSYVIRCPQRLPVTFRPSIA

SEQ ID NO: 55 - DNA, 1467 bp, Vitis vinifera
atgggtttggcttcttcttgggtcttgtacactgctatttttgctggtgctttggctttgagatgggttttgttgagagttaacaagtgggtttacgagggtagattgaagggtaaatcttatcatttgccaccaggtgatttgggttggccattgattggtaatatgtggacttttttgagagccttcaagaccaagaatccagactctttcatttccaacatcgtcgaaagatatggtaagggtggtatctacaagactttcatgtttggtaacccatccatcttggttacttctccagaaggttgtagaaaggttttgaccgatgatgataatttcaaaccaggttggccaacttctaccgaagaattgataggtaagaagtccttcgtcagcatctcttacgaagaacataagagattgagaagattgacctctgctccagttaatggtcatgaagctttgtccttgtacatcccttacatcgaaaagaacgttatctccgatttggagaagtggtctaagatgggtaacattgaattcttgaccggtgttagaaagttgaccttcaagatcatcatgtacattttcttgtccgccgaatctggtgatgttatggaagctttggaaaaagagtacaccatcttgaactatggtgttagagctttggccattaacattccaggttttgcttttcataaggccttcaaggctagaaagaatttggttgctactttacaagctaccgttgacgaaagaaggcaaagagaaagagaaaactcttccgctagagaaaaggatatgttggatgctttgttgcacgttgaagatgagaatggtagaaaattgaccgacgaagaaatcatcgacttgttgatcatgtacttgaacgctggtcatgaatcttcaggtcatgttactatgtgggctactttgttgttgcaaggtcatccagaaattttccaaagagctaaggctgaacaagaagagatcgttaagaatagaccaccaactcaaaagggtttgaccttgagagaagttaggaagatggaatacttgtcccaagttattgacgaaaccttgagatggttgaccttctcattgatggttttcagagaagctaaggccgatgttaatattggtggttacttgtttccaaagggttggaaagttttggtttggttcagagctgttcattacgatccagaaatctacccaaatccagaagttttcaatccatccagatgggataatttcactccaaaggctggtacttttttgccatttggtgctggttctagattgtgtccaggtaatgatttggccaagttggaaatctctatcttcttgcactacttcttgttgaactacagattggaaagggttaacccaggttgtgaattgatgtatttgccacatccaagaccagttgataactgtttggctagagttagaaaggttgcctga

SEQ ID NO: 56 - protein, 488 aa, Vitis vinifera
MGLASSWVLYTAIFAGALALRWVLLRVNKWVYEGRLKGKSYHLPPGDLGWPLIGNMWTFLRAFKTKNPDSFISNIVERYGKGGIYKTFMFGNPSILVTSPEGCRKVLTDDDNFKPGWPTSTEELIGKKSFVSISYEEHKRLRRLTSAPVNGHEALSLYIPYIEKNVISDLEKWSKMGNIEFLTGVRKLTFKIIMYIFLSAESGDVMEALEKEYTILNYGVRALAINIPGFAFHKAFKARKNLVATLQATVDERRQRERENSSAREKDMLDALLHVEDENGRKLTDEEIIDLLIMYLNAGHESSGHVTMWATLLLQGHPEIFQRAKAEQEEIVKNRPPTQKGLTLREVRKMEYLSQVIDETLRWLTFSLMVFREAKADVNIGGYLFPKGWKVLVWFRAVHYDPEIYPNPEVFNPSRWDNFTPKAGTFLPFGAGSRLCPGNDLAKLEISIFLHYFLLNYRLERVNPGCELMYLPHPRPVDNCLARVRKVA

SEQ ID NO: 57 - DNA, 1467 bp, Pisum sativum
atgatcttggagatgggttctatgtgggttgttttgatggctattggtggtgctttgttggttttgagatccatcttgaagaatgtcaactggtggttgtacgaatctaagttgggtgttaagcaatactctttgccaccaggtgatatgggttggccttttattggtaatatgtggtctttcttgagggccttcaaatctaaagatccagactccttcatctcctccatcgtttctagatatggttcttctggtatctacaaggctttgatgtttggtaacccatctgttatcgttactactccagaaggttgtaagagggttttgactgatgacgaaaagtttactactggttggccacaatctaccattgaattgattggtaagaactccttcattgccatgacttacgaagaacacaagagattgagaaggttgacctcctcttctattaacggtatggaagctttgtccttgtacttgaagtacatcgaagagaacgtgatcatctctttggaaaagtggtctaacatgggtcagattgaattcttgaccgagattaggaagttgaccttcaagatcatcatgcacattttcttgtcctccgaatctgaaccagttatggaagccttggaaaaagagtacaccattttgaaccatggtgttagagctatgcaaatcaatgttccaggtttcgcttactacaaagctttgaaggctagaaagaacttggtcggtattttccaatccatcgttgatgacagaagaaacatcagaaaggtctactcccaaaaaaaggccaaggatatgatggattccttgatcgatgttgaagatgacaacggtagaaagttgaacgacgaagatatcatcgacatcatgttgatgtacttgaacgctggtcatgaatcctctggtcatattactatgtgggctacttacttcttgcaaaagcacccagaatacttgaagaaggccaaagaagaacaagaagaaatcatcaagagaaggccatctactcaaaagggtttgaccttgaaagaaatcagaggtatggacttcttgtacaaggttattgacgaaaccatgagggtgattaccttctcattggttgttttcagagaagccaagtctgatgttaccattaacggttacactattccaaagggttggaaggttttgacctggtttagatctgttcatttggacccagaaatctacccaaacccaaaagaattcaacccaaacaggtggaacaaagaacataaggctggtgaatttttgccatttggtgctggtactagattgtgtccaggtaatgatttggccaagatggaaattgctgttttcttgcatcatttcaccttgaactacaggttggaacaattgaatccaaagtgcccaattagatacttgccacatacaagaccaatggataactgtttgggtagagttaagaagtgttaa

SEQ ID NO: 58 - protein, 488 aa, Pisum sativum
MILEMGSMWVVLMAIGGALLVLRSILKNVNWWLYESKLGVKQYSLPPGDMGWPFIGNMWSFLRAFKSKDPDSFISSIVSRYGSSGIYKALMFGNPSVIVTTPEGCKRVLTDDEKFTTGWPQSTIELIGKNSFIAMTYEEHKRLRRLTSSSINGMEALSLYLKYIEENVIISLEKWSNMGQIEFLTEIRKLTFKIIMHIFLSSESEPVMEALEKEYTILNHGVRAMQINVPGFAYYKALKARKNLVGIFQSIVDDRRNIRKVYSQKKAKDMMDSLIDVEDDNGRKLNDEDIIDIMLMYLNAGHESSGHITMWATYFLQKHPEYLKKAKEEQEEIIKRRPSTQKGLTLKEIRGMDFLYKVIDETMRVITFSLVVFREAKSDVTINGYTIPKGWKVLTWFRSVHLDPEIYPNPKEFNPNRWNKEHKAGEFLPFGAGTRLCPGNDLAKMEIAVFLHHFTLNYRLEQLNPKCPIRYLPHTRPMDNCLGRVKKC

SEQ ID NO: 59 - DNA, 1470 bp, Arabidopsis thaliana
atgactgaaaccggtttgatcttgatgtggttcccattgattatcttgggtttgttcgttttgaagtgggttttgaagagagttaacgtctggatctacgtttctaagttgggtgaaaaaaagcactatttgccaccaggtgatttgggttggccagttattggtaatatgtggtcttttttgagagccttcaagacctctgatccagaatctttcattcagtcctacattaccagatacggtagaactggtatctacaaggctcatatgtttggttacccatgtgttttggttactactccagaaacctgtagaagagttttgactgatgatgatgccttccatattggttggccaaaatctaccatgaagttgatcggtagaaagtccttcgttggtatctctttcgaagaacacaagagattgagaagattgacttctgctccagttaatggtccagaagctttgtctgtttacatccagttcattgaagaaaccgttaacaccgatttggagaagtggtctaaaatgggtgaaatcgaattcttgtcccacttgagaaagttgaccttcaaggttattatgtacatcttcttgtcctccgaatccgaacatgttatggattctttggaaagagagtacaccaacttgaactatggtgttagagctatgggtattaacttgccaggttttgcttatcatagagctttgaaggctagaaagaaattggttgctgctttccaatctatcgtcaccaacagaagaaatcagagaaagcagaacatctcctccaacagaaaagatatgttggacaacttgatcgacgtcaaggacgaaaatggtagagttttggatgacgaagaaatcatcgacttgttgttgatgtacttgaacgctggtcatgaatcttcaggtcatttgactatgtgggctaccattttgatgcaagaacatccaatgatcttgcagaaggccaaagaagaacaagaaagaatcgttaagaaaagagccccaggtcaaaagttgactttgaaagaaactagggaaatggtctacttgtcccaagttattgacgaaaccttgagagtgattaccttctcattgactgctttcagagaagccaaatccgatgttcaaatggatggttacattatcccaaagggttggaaagttttgacgtggtttagaaacgttcacttggatccagaaatctacccagatccaaaaaagttcgatccatcaagatgggaaggttacactccaaaagctggtacttttttgccatttggtttgggttctcatttgtgtccaggtaatgatttggccaagttggaaatctccatcttcttgcatcatttcttgttgaagtacagggtcgaaagatctaatccaggttgtccagttatgttcttgccacataatagaccaaaggataactgcttggctagaattactagaaccatgccatga

SEQ ID NO: 60 - protein, 489 aa, Arabidopsis thaliana
MTETGLILMWFPLIILGLFVLKWVLKRVNVWIYVSKLGEKKHYLPPGDLGWPVIGNMWSFLRAFKTSDPESFIQSYITRYGRTGIYKAHMFGYPCVLVTTPETCRRVLTDDDAFHIGWPKSTMKLIGRKSFVGISFEEHKRLRRLTSAPVNGPEALSVYIQFIEETVNTDLEKWSKMGEIEFLSHLRKLTFKVIMYIFLSSESEHVMDSLEREYTNLNYGVRAMGINLPGFAYHRALKARKKLVAAFQSIVTNRRNQRKQNISSNRKDMLDNLIDVKDENGRVLDDEEIIDLLLMYLNAGHESSGHLTMWATILMQEHPMILQKAKEEQERIVKKRAPGQKLTLKETREMVYLSQVIDETLRVITFSLTAFREAKSDVQMDGYIIPKGWKVLTWFRNVHLDPEIYPDPKKFDPSRWEGYTPKAGTFLPFGLGSHLCPGNDLAKLEISIFLHHFLLKYRVERSNPGCPVMFLPHNRPKDNCLARITRTMP

SEQ ID NO: 61 - DNA, 1473 bp, Arabidopsis thaliana
atggctgaaactacttcttggattccagtttggtttccattgatggttttgggttgttttggtttgaactggttggttagaaaggttaacgtttggttgtacgaatcttccttgggtgaaaacagacattatttgccaccaggtgatttgggttggccttttattggtaatatgttgtccttcttgagagccttcaaaacctctgatccagattctttcactaggaccttgattaagagatacggtccaaaaggtatctacaaggctcatatgtttggtaacccatctattatcgttaccacctctgatacctgtagaagagttttgactgatgatgatgcttttaaaccaggttggccaacttctaccatggaattgattggtagaaagtccttcgttggtatctctttcgaagaacacaagagattgagaagattgactgctgctccagttaatggtcatgaagctttgtctacctacatcccttacatcgaagaaaacgttattaccgttttggacaagtggactaagatgggtgaatttgaattcttgacccacttgagaaagttgaccttcagaatcatcatgtacattttcttgtcctccgaatccgaaaacgttatggatgctttggaaagagagtacactgctttgaattatggtgttagagctatggccgttaacattccaggttttgcttatcatagagctttgaaggctagaaagactttggttgctgctttccaatctatcgttaccgaaagaagaaatcagaggaagcagaacatcttgtccaacaaaaaggatatgttggacaacttgttgaacgttaaggacgaagatggtaagaccttggatgatgaagaaatcatcgatgtcttgttgatgtacttgaacgctggtcatgaatcttccggtcatacaattatgtgggctactgttttcttacaagaacacccagaagttctacaaagagctaaagctgaacaagaaatgatcttgaagtctagaccagaaggtcaaaagggcttgtctttgaaagaaaccagaaagatggaattcttgtcccaagttgttgacgaaaccttgagagttattaccttctcattgaccgctttcagagaagctaaaaccgatgttgaaatgaacggttacttgattccaaagggttggaaagttttgacgtggttcagagatgttcatatcgatccagaagttttcccagatccaagaaaatttgatccagctagatgggataatggtttcgttccaaaagctggtgcttttttgccatttggtgctggttctcatttgtgtccaggtaatgatttggccaagttggaaatctccatcttcttgcatcactttttgttgaagtaccaggtcaagagatctaacccagaatgtccagttatgtacttgccacatacaagaccaactgataactgcttggctagaatctcttaccagtga

SEQ ID NO: 62 - protein, 490 aa, Arabidopsis thaliana
MAETTSWIPVWFPLMVLGCFGLNWLVRKVNVWLYESSLGENRHYLPPGDLGWPFIGNMLSFLRAFKTSDPDSFTRTLIKRYGPKGIYKAHMFGNPSIIVTTSDTCRRVLTDDDAFKPGWPTSTMELIGRKSFVGISFEEHKRLRRLTAAPVNGHEALSTYIPYIEENVITVLDKWTKMGEFEFLTHLRKLTFRIIMYIFLSSESENVMDALEREYTALNYGVRAMAVNIPGFAYHRALKARKTLVAAFQSIVTERRNQRKQNILSNKKDMLDNLLNVKDEDGKTLDDEEIIDVLLMYLNAGHESSGHTIMWATVFLQEHPEVLQRAKAEQEMILKSRPEGQKGLSLKETRKMEFLSQVVDETLRVITFSLTAFREAKTDVEMNGYLIPKGWKVLTWFRDVHIDPEVFPDPRKFDPARWDNGFVPKAGAFLPFGAGSHLCPGNDLAKLEISIFLHHFLLKYQVKRSNPECPVMYLPHTRPTDNCLARISYQ

SEQ ID NO: 63 - DNA, 1473 bp, Pisum sativum
atggcttccttgtggtttattttcggtgctattgctggtgctttgttggttttgagatctttgttgaagaacgtcaactggttcttgtacgaagctaaattgggtgacaagcaatattctttgccaccaggtgatatgggttggccaattattggtaatatgtggtctttcttgagggccttcaaatcttctaagccagattctttcatggactccatcgttaagagatttggtaacactggtatctacaaggtgttcatgtttggtttcccatctgttatcgttacttctccagaagcttgcaaaaaggttttgactgatgacgaaaatttcgaaccaggttggccacaatctaccgttgaattgattggtgaaaagtccttcatcaagatgccattcgaagaacatagaaggttgagaagattgacctccgcttctattaacggttatgaagctttgtccgtctacttgaagtacatcgaagaaatcgtcatctcctcattggaaaagtggactcaaatgggtgaaatcgaattcttgacccagatgagaaagttgaccttcaagatcatcatccacattttcttgggttccgaatctgaaccagttatggaagctttggaaagagagtacactgttttgaacttgggtgttagagctatgagaatcaacattccaggtttcgctttccacaaatctttgaaggctagaaagaacttggttgccatcttccaatctatcgttgacaagagaagaaacgagagaagaggtaaagaaccagctccaggtaaaaaagctaaggatatgatggattccttgatcgatgctgttgacgaaaatggtagaaaattgggtgatgacgaaatcatcgacatcatgttgatgtacttgaacgctggtcatgaatcctctggtcatattactatgtgggctacttacttcttgcaaagacatccagaattcttcagaaaggccaaagaagaacaagtcgagatgttgaaaagaaggccaccatctcaaaaaggtttgaagttggaagatgtgagaaagatggaatacttgtccaaggttattgacgaaaccatgagagttgttaccttcagcttgatggttttcagacaagctagaaacgatgttaaggtcaacggttacttgattccaaaaggttggagagttttgacgtggttcagatctgttcatttcgattccgaattatacccagacccaagagaattcaatccagaaaacttctccgttgttagaaaggctggtgaatttttgccatttggtgctggtactagattgtgtccaggtaatgatttggccaagttggaaatctctgttttcttgcatcacttcttgttgaagtacgaattggaacagttgaacccaaagtccccaattagatttttgccacatacaagaccattggataactgcttggctagaatcaaaaaacaagaagctgcctaa

SEQ ID NO: 64 - protein, 490 aa, Pisum sativum
MASLWFIFGAIAGALLVLRSLLKNVNWFLYEAKLGDKQYSLPPGDMGWPIIGNMWSFLRAFKSSKPDSFMDSIVKRFGNTGIYKVFMFGFPSVIVTSPEACKKVLTDDENFEPGWPQSTVELIGEKSFIKMPFEEHRRLRRLTSASINGYEALSVYLKYIEEIVISSLEKWTQMGEIEFLTQMRKLTFKIIIHIFLGSESEPVMEALEREYTVLNLGVRAMRINIPGFAFHKSLKARKNLVAIFQSIVDKRRNERRGKEPAPGKKAKDMMDSLIDAVDENGRKLGDDEIIDIMLMYLNAGHESSGHITMWATYFLQRHPEFFRKAKEEQVEMLKRRPPSQKGLKLEDVRKMEYLSKVIDETMRVVTFSLMVFRQARNDVKVNGYLIPKGWRVLTWFRSVHFDSELYPDPREFNPENFSVVRKAGEFLPFGAGTRLCPGNDLAKLEISVFLHHFLLKYELEQLNPKSPIRFLPHTRPLDNCLARIKKQEAA

SEQ ID NO: 65 - DNA, 1491 bp, Cucurbita maxima
atggaatctacttgggctgttgctgctgttgttacagctgttgttgcagttgctactgttttctctgttttgaaatgggctgctaagtctttgaacgaatggatctatgaagctaagttgggtgatagaagattggctttgccaccaggtgatttgggttggccattgattggtaatatgttgggttttttgagggccttcaagtctaagaatccagaaactttcatcgacggttacgtttctagatacggtaaaactggtgtttacaaggttcacttgtttggtaacccatctgttgttgttactactccagaaacctgtagaaaggttttgactgatgatgaagcttttcaaccaggttggccaagagctgctgttgaattgattggtgaaaagtccttcatccagatgccacaagaagaacataagagattgagaagattgacctctgctccagttaatggttttgaagctttgtccaactacatcccttacatcgaaaagaacgtcttggaatctttggagaagtggtctaaaatgggtccaattgaattcttgacccagttgagaaagttgaccttcaccgttattatgtacatcttcttgtcctccgaatccgaaccagttatggaaatgttggaaaaagagtacaccaggttgaactacggtgttagagatatgagaatcaacttgccaggtttcgcttatcataaggctttgaaggctagaaagaatttggttgctgctttgaagggtatcgttactgaaagaagaaggcaaaagttggataagtgggctccaaaaagaaaggatatgatggaccaattgatcgacatcgttgacgaaaatggtagaaagttggatgacgaagaaatcatcgacatcttgatcatgtacttgaacgctggtcatgaatcttcaggtcatacaatgatgtgggctaccatcttgttgaatcaacatccagaagttttgaagaaggccagggaagaacaagaagctatcgttagaaatagaccagcaggtcaaactggcttgactttgaaagaatgtagagacatggaatacttgtccaaggttgttgacgaaaccttgagatacgtttccttctcattggtcgttttcagagaagctcaaatggatgttaacttgaacggttacttgattccaaagggttggaaagttttggcctggttcagatctattcactacgattctgaagtttacccagacccaaaaaagttcgaaccatcaagatgggatggttttgttccaaaagctggtgaatttttgccatttggtgctggttctagattgtgtccaggtaatgatttggctaagttggaaatctgcatcttcgtccactactttttgttgaactacaacttggaatggttgaccccagattgtgaaatcttgtatttgccacattccagaccaaaggataactgcatggctaagattaccaagaaatcttctgttgctgcctaa

SEQ ID NO: 66 - protein, 496 aa, Cucurbita maxima
MESTWAVAAVVTAVVAVATVFSVLKWAAKSLNEWIYEAKLGDRRLALPPGDLGWPLIGNMLGFLRAFKSKNPETFIDGYVSRYGKTGVYKVHLFGNPSVVVTTPETCRKVLTDDEAFQPGWPRAAVELIGEKSFIQMPQEEHKRLRRLTSAPVNGFEALSNYIPYIEKNVLESLEKWSKMGPIEFLTQLRKLTFTVIMYIFLSSESEPVMEMLEKEYTRLNYGVRDMRINLPGFAYHKALKARKNLVAALKGIVTERRRQKLDKWAPKRKDMMDQLIDIVDENGRKLDDEEIIDILIMYLNAGHESSGHTMMWATILLNQHPEVLKKAREEQEAIVRNRPAGQTGLTLKECRDMEYLSKVVDETLRYVSFSLVVFREAQMDVNLNGYLIPKGWKVLAWFRSIHYDSEVYPDPKKFEPSRWDGFVPKAGEFLPFGAGSRLCPGNDLAKLEICIFVHYFLLNYNLEWLTPDCEILYLPHSRPKDNCMAKITKKSSVAA

SEQ ID NO: 67 - DNA, 1500 bp, Hordeum vulgare
atgggtgaaggtgcttggtgggctgttgctgctgttgttgctgctttggctgttgttgcattggatgctgctgttagaactgctcatgcttggtattggactgcttctttgggtgctggtagaagaggtagattgccaccaggtgatatgggttggccattggttggtggtatgtgggcttttttgagagcttttaaatctggtagaccagactccttcattgattcttttgctagaagatttggtagagccggcttgtatagagcttttatgttttcttctccaaccattatggctactactccagaagcttgtaagcaagttttgatggatgatgatgctttcgttactggttggccaaaagctactgttgctttgattggtccaaagtcctttgttaacatgggttacgatgaacacagaaggttgagaaaattgactgctgctccaatcaatggtttcgatgctttgacttcttacttgggtttcatcgatgatactgttgttactactttgaggggttggtctgaaaggggtggtgatggtcattttgaattcttgactgaattgagaaggatgaccttcagaatcatcgtccaaattttcatgggtggtgctgacgaaagaactgctgctgaattggaaagaacttacaccgaattgaactacggtatgagagctatggctattgatttgccaggttttgcttaccataaggctattagagctagaagaagattggttgctgctttacaaagagttttggacgagagaagggctagaggtggtaaaactgctgctggtgctgctgctccagttgatatgatggatagattgattgccgttgaagatgaaggtggtagaagattgcaagatgacgaaatcatcgatgtcttggtcatgtatttgaacgctggtcatgaatcctctggtcatattactatgtgggctactgttttcttgcaagagaacccagaaattttggctaaagctaaagctgaacaagaggccattatgagatctattccaccaggtcaaaaaggcttgactttgagagattttagaaagatggcctacttgtcccaagttgttgacgaaactttgagattcgtcaacatctccttcgtgtcttttagacaagctaccagagatgttttcgtcaacggttacttgattccaaaaggttggaaagtccaattgtggtacagatccgttcatatggatccacaagtttatccagatccaaagaagttcgatccatcaagatgggaaggtccaccaccaagagctggtacttttttgccatttggtttgggtactagattgtgtccaggtaatgatttggccaagttggaaatctcagttttcttgcatcatttcttgttgggctacaagttgactagaaagaacccaaactgtagagtcagatatttgccacatccaagaccagttgataactgcttggctaagattaccagattgtcatcttctcacggttaa

SEQ ID NO: 68 - protein, 499 aa, Hordeum vulgare
MGEGAWWAVAAVVAALAVVALDAAVRTAHAWYWTASLGAGRRGRLPPGDMGWPLVGGMWAFLRAFKSGRPDSFIDSFARRFGRAGLYRAFMFSSPTIMATTPEACKQVLMDDDAFVTGWPKATVALIGPKSFVNMGYDEHRRLRKLTAAPINGFDALTSYLGFIDDTVVTTLRGWSERGGDGHFEFLTELRRMTFRIIVQIFMGGADERTAAELERTYTELNYGMRAMAIDLPGFAYHKAIRARRRLVAALQRVLDERRARGGKTAAGAAAPVDMMDRLIAVEDEGGRRLQDDEIIDVLVMYLNAGHESSGHITMWATVFLQENPEILAKAKAEQEAIMRSIPPGQKGLTLRDFRKMAYLSQVVDETLRFVNISFVSFRQATRDVFVNGYLIPKGWKVQLWYRSVHMDPQVYPDPKKFDPSRWEGPPPRAGTFLPFGLGTRLCPGNDLAKLEISVFLHHFLLGYKLTRKNPNCRVRYLPHPRPVDNCLAKITRLSSSHG

SEQ ID NO: 69 - DNA, 1536 bp, Sphaceloma manihoticola
atgccacaagctattccagctcataagatgatgccaattccaggtgttggtgtttacgtttttactgttttgtgggctgctactatctacattgcttcatctttgttgagatggtccttggattccttgaaacatttgccaatcgtcaacaacaaagaatggtactctttgtctggtagaaaggccaagttgagatttttggctgaatccaagtctttgttggaagaagctagaaagagatacccacaacaaccattcagaatcttgtctaattggggtgttttgttggttttgccatcttgttttgccgacgaaatcagaaacgatcagagattgtctttttcaaaggctgccttgcaagattcccatggtcatattccaggtttggaaactgttaagttggttgccagagatgaccaattgattcaaaccgttgctagaaagcacttgaccaaacatttggccaaagttatccaaccattgtccgaagaaactgaattcgctttggatcaaaacttcggtcataacccagccatcttggatattattgccagaatctcttccaggatctacttgggtgatgaattgtgtagaaatactgcttggttggctactactaaggtttacacttctgctttttttgctgccccagttaagttgggtttgattccagctccattgagaagattggctcattggttgattccagaatgcaagatcttgagagaacaagttcaagaagccagaagaatcatcgaaccattggttagaagaaggcaagctttgagagctaaagctttggctgaaggttgtccaactccacaattcaatgatgctttgggttgggctgctgaagaatctgctaaaaatggtaaagattacgatccagccattacccaattggctttgtctatgttggctattcataccacctacgacttgttccaacaatgcattttagatttggcccaaaacccacatttcatcgaacctttgagacaagaagccatcgaagtcattcaacaatatggttggacaaagcaaggcttgtaccatatgaagttgttggattccgctttgaaagaaacccaaagattgaaaccaggttccatggttactatgagaagatatgtcttggaggacttgcaattgtccaacggtttgattttgaaaaagggcaccagaatcaacatcgacactcaaagaatgagagatccagacttgcatgaagatccattgaagtacgatgctttcaggttctacaagatgagacaacaaccaggtggtgaacatactgctcaattggtttctacttctccagatcatttgggttttggtcatggtgaacattcttgtccaggtagattttttgctgctaacgaaatcaaagttgccatggctcatatgttgatcaagtacgaatggaaaccagctggtcattcttctgctggtccagatgttaagggtttgttgatgaagtctggtgctggtgctcaaattgatatcagaagaagagaaaccgttgagatcgcttga

SEQ ID NO: 70 - protein, 511 aa, Sphaceloma manihoticola
MPQAIPAHKMMPIPGVGVYVFTVLWAATIYIASSLLRWSLDSLKHLPIVNNKEWYSLSGRKAKLRFLAESKSLLEEARKRYPQQPFRILSNWGVLLVLPSCFADEIRNDQRLSFSKAALQDSHGHIPGLETVKLVARDDQLIQTVARKHLTKHLAKVIQPLSEETEFALDQNFGHNPAILDIIARISSRIYLGDELCRNTAWLATTKVYTSAFFAAPVKLGLIPAPLRRLAHWLIPECKILREQVQEARRIIEPLVRRRQALRAKALAEGCPTPQFNDALGWAAEESAKNGKDYDPAITQLALSMLAIHTTYDLFQQCILDLAQNPHFIEPLRQEAIEVIQQYGWTKQGLYHMKLLDSALKETQRLKPGSMVTMRRYVLEDLQLSNGLILKKGTRINIDTQRMRDPDLHEDPLKYDAFRFYKMRQQPGGEHTAQLVSTSPDHLGFGHGEHSCPGRFFAANEIKVAMAHMLIKYEWKPAGHSSAGPDVKGLLMKSGAGAQIDIRRRETVEIA

SEQ ID NO: 71 - DNA, 1542 bp, Brachypodium distachyon
atggaagtcggtatggttatgaaggcttctttgtctttgtgttgtgttggtgcttgttgtttggccttgtacttgtattatatcgtttgggttgttccacaaaggttgttggctggttttagaaggcaaggtattggtggtccaagaccatcttttccatatggtaatttggccgatatgaaggaagctgttgctgctgctaaagttgcttctagaggtgttggtggtatcgttcatgattatagaccagctgttttgccattctacgagaagtggagaaaagaacatggtccagttttcacttactccatgggtaatgttgttttcttgcacgtttctagaccagatgttgttagagatatcaacttgtgcgtttccttggacttgggtaaatcttcttacttgaaggctactcacgaacctttgtttggtagaggtattttgaagtctaatggtcaagcttgggctcaccaaagaaagattattgctccagcattcttcttggataaggttaagggtatggttgatttgatggttgattctgctcaaaccttgttgaagtcttgggaagaaagggttgatggtaatggtggtactgttaacatcaagatcgatgatgatatcagagcttactccgccgatgttatttctagaacttgtttcggttcctcctacatcaagggtaagaagatctttttgaagttgagagaattgcagaaggccgtttctaagccaaatgttttggctgaaatgactggtttgaggttgtttccaactaagaagaatagacaagcctgggaattgcatagacaagttcataagttgatcttggaaatcgtcaaagaatccggtgaggataagaacttgttgtctactattttacactccgcctcttcatctaaagttggtttgggtgaagctgaaaacttcatcgttgataactgcaagtctatctacttcgctggttatgaatctactgctgttactgctgcttggtgtttgatgttgttgggtttacatccagaatggcaagataaggttagagaagaggttcaagaggtttgtggtggtagaccaattgattctcaatccttgcaaaagatgaagaacctaaccatggtcatccaagaaactttgagattatatccagctggtgccttcgtttctagaatggctttacaagaattgaagttgggtggtgttaacatcccaaagggtgttaatatctacatcccagtttctaccatgcacttggatccaaaattgtggggtgctgatgtcaaagaattcaacccagaaagattctctgatgccagaccacaattgcattcttatttgccatttggtgctggtgctagaacatgtttgggtcaaggttttgctactgccgaattgaagattttgatctccttgatcatttccaagttcgccttgaagttgtccccattatatgaacattctccaaccttgaagttggtcgttgaaccagaatttggtgttgatttgactttgaccaaagttcaaggtgcttgtagatgctga

SEQ ID NO: 72 - protein, 513 aa, Brachypodium distachyon
MEVGMVMKASLSLCCVGACCLALYLYYIVWVVPQRLLAGFRRQGIGGPRPSFPYGNLADMKEAVAAAKVASRGVGGIVHDYRPAVLPFYEKWRKEHGPVFTYSMGNVVFLHVSRPDVVRDINLCVSLDLGKSSYLKATHEPLFGRGILKSNGQAWAHQRKIIAPAFFLDKVKGMVDLMVDSAQTLLKSWEERVDGNGGTVNIKIDDDIRAYSADVISRTCFGSSYIKGKKIFLKLRELQKAVSKPNVLAEMTGLRLFPTKKNRQAWELHRQVHKLILEIVKESGEDKNLLSTILHSASSSKVGLGEAENFIVDNCKSIYFAGYESTAVTAAWCLMLLGLHPEWQDKVREEVQEVCGGRPIDSQSLQKMKNLTMVIQETLRLYPAGAFVSRMALQELKLGGVNIPKGVNIYIPVSTMHLDPKLWGADVKEFNPERFSDARPQLHSYLPFGAGARTCLGQGFATAELKILISLIISKFALKLSPLYEHSPTLKLVVEPEFGVDLTLTKVQGACRC

SEQ ID NO: 73 - DNA, 1542 bp, Sphaceloma manihoticola
atggctttcactgctcaatcctacttcgatattggtgaacacttgagagtttccgtcattttgttgttgactaccgttgttttgttgttggtgttctctttgaaggccagaaagaaatctttgttgccattggttaatggtaacagatggactgatccattgggtattgaagccaagaaaaagttcatgacctccgccagatctattattgctgaacaattggaaaaagccccaggtaaacctttcagagttgtttctgatgttggtgaattggttgttttgccaccagaatttgctccagaaatcagaaaccacaaggacttttcttttaccatggctgcttacaagtggttctatgctcatttgccaggtatggaaggttttagagaaggtactaccgaatcccaaatcatgaagttggttgctagacatcaattgactcaccaattgactgttgttactgctccagttgctgaagaatctgctagagctttgagagatgttttcggttgtgatgaaggttggagagaattgggtactagacaagcttgcttgcaagttattgctagagtctcctctagaatcttcttgggtcaagaattgtgtagaaacccagattggttgagagttacttctacctattctgttttggctttcagagccgttgttgttttgagattttggccagctccattgagaaatttggttcattggtttttgccagcttgtaaggctgctagagatttggttcaagaagctagagacttggttaaccctttgttgcaagaaagaaacgaagaaagaagggctcaagctaaaggtgaatctgtcttgtatagaaacgatgccattgactggttggaagaattagctactgataagaacttgaactacgatccagctgcttctcaattgtctttgtctactgctgctttacactcttctactgattttttcgctcagttgttgttggatttggctgaaagaccaggtttggctgaagaattgagacaagaagctgctaaggttgttaatactgaaggttggtctaagggttccttgttcgatttgaaattgatggactccgtcatgaaggaatcccaaagattgaaacctatttccttggcctctatgagaagatacactactgctgatgttaagatgtcctccggtgatgttattccaaaaggttctttgacagttgtctccgcttatagacattgggacgaaaaaacttacgaaaggccagatgaattcgatggtcatagattcttgaggatgagatcccaagaaggtaaagaacatcaagcccatttggtttctgctacccaagatcattttggtttcggttatggtttacatgcttgtccaggtagatttttcgctgctgaagaagttaagatcgttttggctcaaatgttgttgcagtacgaaattagattggttgccggttctgattctagaccagttcatgctggtttgaatatgtatgctaatccagcctccaagatctccgttagatatagaggttcttccttttaa

SEQ ID NO: 74 - protein, 513 aa, Sphaceloma manihoticola
MAFTAQSYFDIGEHLRVSVILLLTTVVLLLVFSLKARKKSLLPLVNGNRWTDPLGIEAKKKFMTSARSIIAEQLEKAPGKPFRVVSDVGELVVLPPEFAPEIRNHKDFSFTMAAYKWFYAHLPGMEGFREGTTESQIMKLVARHQLTHQLTVVTAPVAEESARALRDVFGCDEGWRELGTRQACLQVIARVSSRIFLGQELCRNPDWLRVTSTYSVLAFRAVVVLRFWPAPLRNLVHWFLPACKAARDLVQEARDLVNPLLQERNEERRAQAKGESVLYRNDAIDWLEELATDKNLNYDPAASQLSLSTAALHSSTDFFAQLLLDLAERPGLAEELRQEAAKVVNTEGWSKGSLFDLKLMDSVMKESQRLKPISLASMRRYTTADVKMSSGDVIPKGSLTVVSAYRHWDEKTYERPDEFDGHRFLRMRSQEGKEHQAHLVSATQDHFGFGYGLHACPGRFFAAEEVKIVLAQMLLQYEIRLVAGSDSRPVHAGLNMYANPASKISVRYRGSSF

SEQ ID NO: 75 - DNA, 285 bp, Bradyrhizobium diazoefficiens
atgagagttatggttgatcaagacttgtgtggtacttctggtcaatgtgttttgactttgccaggtacttttagacaaagggaaccagatggtgttgctgaagtttgtgttgctactgttccacatgctttacatgctgctgttagattggctgcttctcaatgtccagttgctcattctggtcatagaaaaagaaggtggaggtggagagctagacaagctccaactttgagattattgcagagaaggccatgtggtatgccaagaaaaacttctaccatctaa

SEQ ID NO: 76 - protein, 94 aa, Bradyrhizobium diazoefficiens
MRVMVDQDLCGTSGQCVLTLPGTFRQREPDGVAEVCVATVPHALHAAVRLAASQCPVAHSGHRKRRWRWRARQAPTLRLLQRRPCGMPRKTSTI

SEQ ID NO: 77 - DNA, 1569 bp, Hordeum vulgare
atgatggacatggaaatggaagttggtatggttatgaaggtcttgttgggtttgtgttgtgttggtgcttgttctttggcactatacttgtattacaccgtttgggttgtcccacaaagattattggctggttttagaaggcaaggtattggtggtccaagaccatcttttccatatggtaatatggccgatatgagagaagctgttgctgctgctaaatctgctagaagatctggtggtagaatgagaatcgttcatgattatagaccagccgttttgccattttacgagaagtggagaaaagaacatggtccagttttcacttactccatgggtaatgttgttttcttgcacgtttctagaccagatgttgttagagatatcaacttgtgcgtttccttggacttgggtaaatcttcttacttgaaggctactcacgaacctttgtttggtagaggtattttgaagtctaatggtgaagcttgggctcaccaaagaaagattattgctccagaattcttcttggacaaggttaagggtatggttgatttgatggttgattctgctcaaaccttgttggaatcttgggaagctagagttgataagtctggtggtactgttgatatcaagatcgatgatgatatcagagcttactccgccgatgttatttctagaacttgtttcggttcctcctacgttaagggtaagaagatctttttgaagttgagagaattgcagaaggccgtttctaagccaaatgttttggctgaaatgaccggtttgagattctttccaactaagaagaatagacaagcctggggtttacacaagcaagttcatagattgatcttggaaatcgtcaaagaatccggtgaggataagaatttgttgagagctattttacactccgcctcttcatctaaagttggtttgggtgaagctgaaaacttcatcgttgataactgcaagtctatctacttcgctggttatgaatctactgctgttactgctgcttggtgtttgatgttgttgggtttacatccagaatggcaagatagagttagacaagaggttttggaagtttgtggtggtagaccattggattctcaatccttgcaaaagatgaagaacctaaccatggtcatccaagaaactttgagattatatccagctggtgccttcgtttctagaatggctttacaagaattgaagttgggtggtgttcatatcccaaagggtgttaatatctacatcccagtttctaccatgcacttggatccaaaattgtggggtccagatgctaaagaattcaatccagctagattctctgatgccagaccacaattgcattcttatttgccatttggtgctggtgctagaacatgtttgggtcaaggttttgctactgccgaattgaagattttgatctccttgatcatttccaagttcgccttgagattgtccccattatatcaacattctccagccttgaagttgatcgttgaaccagaatttggtgttgatatcaccttgactaaggttcaaactgcttctactactacctactaa

SEQ ID NO: 78 - protein, 522 aa, Hordeum vulgare
MMDMEMEVGMVMKVLLGLCCVGACSLALYLYYTVWVVPQRLLAGFRRQGIGGPRPSFPYGNMADMREAVAAAKSARRSGGRMRIVHDYRPAVLPFYEKWRKEHGPVFTYSMGNVVFLHVSRPDVVRDINLCVSLDLGKSSYLKATHEPLFGRGILKSNGEAWAHQRKIIAPEFFLDKVKGMVDLMVDSAQTLLESWEARVDKSGGTVDIKIDDDIRAYSADVISRTCFGSSYVKGKKIFLKLRELQKAVSKPNVLAEMTGLRFFPTKKNRQAWGLHKQVHRLILEIVKESGEDKNLLRAILHSASSSKVGLGEAENFIVDNCKSIYFAGYESTAVTAAWCLMLLGLHPEWQDRVRQEVLEVCGGRPLDSQSLQKMKNLTMVIQETLRLYPAGAFVSRMALQELKLGGVHIPKGVNIYIPVSTMHLDPKLWGPDAKEFNPARFSDARPQLHSYLPFGAGARTCLGQGFATAELKILISLIISKFALRLSPLYQHSPALKLIVEPEFGVDITLTKVQTASTTTY

SEQ ID NO: 79 - DNA, 1575 bp, Gibberella fujikuroi
atgtccatcttcaacatgattacctcttatgctggttctcagttgttgccattctacattgctatcttcgttttcactttggttccatgggctattagattctcttggttggaattgagaaagggttctgttgttccattggctaatccaccagattctttgtttggtactggtaagactagaaggtccttcgttaagttgtccagagaaattttggctaaggccagatctttgtttccaaacgaaccattcagattgattaccgattggggtgaagttttgattttgccaccagattttgccgacgaaattagaaatgatccaagattgtctttctcaaaggctgccatgcaagataatcatgctggtattccaggtttcgaaactgttgctttggttggtagagaagatcagttgattcaaaaggttgccagaaagcaattgaccaaacatttgtccgctgttatcgaaccattgtctagagaatctactttggccgtttctttgaacttcggtgaaactactgagtggagagctattagattgaagccagccattttggatattatcgccagaatctcttccaggatctatttgggtgatcaattgtgtagaaacgaagcctggttgaagattactaagacttacactaccaacttctacaccgcttctaccaatttgagaatgttcccaagatccattagaccattggctcattggtttttgccagaatgtagaaagttgagacaagaaagaaaggatgccattggtattatcaccccattgatcgaaagaagaagagaattgagaagggctgctattgctgctggtcaaccattgccagtttttcatgatgctattgactggtctgaacaagaagctgaagctgctggtactggtgcttcttttgatccagttattttccagttgaccttgtccttgttggctattcatacaacctacgatttgttgcaacagaccatgattgatttgggtagacatccagagtacattgaaccattaagacaagaagttgtccagttgttgagagaagaaggttggaaaaagactaccttgttcaagatgaagttgttggactccgctatcaaagaatcccaaagaatgaagccaggttctatcgttactatgagaagatacgttaccgaagatatcaccttgtcatctggtttgactttgaaaaagggtactagattgaacgtcgataacagaagattggacgatccaaagatctacgataacccagaagtttacaacccatacagattctacgacatgagatctgaagctggtaaagatcatggtgctcaattggtttctactggttctaatcatatgggtttcggtcatggtcaacattcttgtccaggtagattttttgctgccaacgaaatcaaagttgccttgtgtcatatcttggttaagtacgattggaagttgtgtccagatactgaaactaagccagataccagaggtatgattgctaaatcttctccagttaccgacattttgatcaagagaagagaatccgttgaattggatttggaagccatctga

SEQ ID NO: 80 - protein, 524 aa, Gibberella fujikuroi
MSIFNMITSYAGSQLLPFYIAIFVFTLVPWAIRFSWLELRKGSVVPLANPPDSLFGTGKTRRSFVKLSREILAKARSLFPNEPFRLITDWGEVLILPPDFADEIRNDPRLSFSKAAMQDNHAGIPGFETVALVGREDQLIQKVARKQLTKHLSAVIEPLSRESTLAVSLNFGETTEWRAIRLKPAILDIIARISSRIYLGDQLCRNEAWLKITKTYTTNFYTASTNLRMFPRSIRPLAHWFLPECRKLRQERKDAIGIITPLIERRRELRRAAIAAGQPLPVFHDAIDWSEQEAEAAGTGASFDPVIFQLTLSLLAIHTTYDLLQQTMIDLGRHPEYIEPLRQEVVQLLREEGWKKTTLFKMKLLDSAIKESQRMKPGSIVTMRRYVTEDITLSSGLTLKKGTRLNVDNRRLDDPKIYDNPEVYNPYRFYDMRSEAGKDHGAQLVSTGSNHMGFGHGQHSCPGRFFAANEIKVALCHILVKYDWKLCPDTETKPDTRGMIAKSSPVTDILIKRRESVELDLEAI

SEQ ID NO: 81 - DNA, 1578 bp, Fusarium proliferatum
atgaacaagtccaactctatgaacaacacctctttggaaaggttgttccaacaattggttttgggtttggatggtatcccattgatggatgttcattggttgatctacgttgcttttggtgcttggttgtgctcttacgttattcacgttttgtcctcttcatccactgttaaggttccagttgttggttacagatctgtttttgaacctacctggttgttgagattgagatttgtttgggaaggtggttccattattggtcaaggttacaacaagttcaaggactccattttccaagtcagaaagttgggtactgatatcgttattatcccaccaaacttcatcgacgaagtgagaaaattgtctcaagacaagaccagatctgtcgaaccattcattaacgattttgctggtcagtacactaggggtatggtttttttacaatccgacttgcaaaacagagtcatccaacaaagattgaccccaaagttggtttctttgaccaaggttatgaaggaagaattggattacgccttgaccaaagaaatcccagatatgaaggatgatgaatgggttgaagttgacatctcctccattatggttagattgatctccagaatttccgccagagtttttttgggtccagaacattgcagaaatcaagaatggttgactaacaccgctgaatactctgaatctttgttcattaccggtttcatcttgagagttgtcccacatatcttgaggccttttattgctccattattgccatcttacagaaccttgttgaggaacgtttcttctggtagaagagttatcggtgacatcatcagatctcaacaaggtgatggtaacgaggatattttgtcttggatgagagatgctgctactggtgaagaaaagcaaattgataacattgcccagagaatgttgatcttgtccttggcttctattcataccactgctatgactatgactcatgccatgtatgatttgtgtgctagaccagagtatatcgaaccattgagagatgaagttaagggtgttgttgatgcttctggttgggataagactgctttgaatagattgcacagattggactcattcttgaaagaatcccaaagattcaacccagtgttcttgttgactttcaacagaatctaccaccagtctatgactttgtctgatggtactaatttgccatccggtactagaattgctgttccatctcatgctatgttgcaagattctgctcatgttccaggtccaactccaccaactgaatttgatggtttcaggtactccaagatcaggtctgattctaattacgcccaaaagtacttgttctccatgaccgattcttctaatatggctttcggttacggtaaatatgcttgtccaggtagattttacgcctccaacgaaatgaagttgaccttggctattttgttgttgcagttcgaattcaagttgccagatggtaaaggtagaccaagaaacattaccatcgattccgatatgattccagatccaagagctagattgtgcgtcagaaaaagatctttgagggacgaatga

SEQ ID NO: 82 - protein, 525 aa, Fusarium proliferatum
MNKSNSMNNTSLERLFQQLVLGLDGIPLMDVHWLIYVAFGAWLCSYVIHVLSSSSTVKVPVVGYRSVFEPTWLLRLRFVWEGGSIIGQGYNKFKDSIFQVRKLGTDIVIIPPNFIDEVRKLSQDKTRSVEPFINDFAGQYTRGMVFLQSDLQNRVIQQRLTPKLVSLTKVMKEELDYALTKEIPDMKDDEWVEVDISSIMVRLISRISARVFLGPEHCRNQEWLTNTAEYSESLFITGFILRVVPHILRPFIAPLLPSYRTLLRNVSSGRRVIGDIIRSQQGDGNEDILSWMRDAATGEEKQIDNIAQRMLILSLASIHTTAMTMTHAMYDLCARPEYIEPLRDEVKGVVDASGWDKTALNRLHRLDSFLKESQRFNPVFLLTFNRIYHQSMTLSDGTNLPSGTRIAVPSHAMLQDSAHVPGPTPPTEFDGFRYSKIRSDSNYAQKYLFSMTDSSNMAFGYGKYACPGRFYASNEMKLTLAILLLQFEFKLPDGKGRPRNITIDSDMIPDPRARLCVRKRSLRDE

SEQ ID NO: 83 - DNA, 2142 bp, Gibberella fujikuroi
atggcagaattagatacacttgatatagtagtattaggtgttatctttttgggtactgtggcatactttactaagggtaaattgtggggtgttaccaaggatccatacgctaacggattcgctgcaggtggtgcttccaagcctggcagaactagaaacatcgtcgaagctatggaggaatcaggtaaaaactgtgttgttttctacggcagtcaaacaggtacagcggaggattacgcatcaagacttgcaaaggaaggaaagtccagattcggtttgaacactatgatcgccgatctagaagattatgacttcgataacttagacactgttccatctgataacatcgttatgtttgtattggctacttacggtgaaggcgaaccaacagataacgccgtggatttctatgagttcattactggcgaagatgcctctttcaatgagggcaacgatcctccactaggtaacttgaattacgttgcgttcggtctgggcaacaatacctacgaacactacaactcaatggtcaggaacgttaacaaggctctagaaaagttaggagctcatagaattggagaagcaggtgagggtgacgacggagctggaactatggaagaggactttttagcttggaaagatccaatgtgggaagccttggctaaaaagatgggcttggaggaaagagaagctgtatatgaacctattttcgctatcaatgagagagatgatttgacccctgaagcgaatgaggtatacttgggagaacctaataagctacacttggaaggtacagcgaaaggtccattcaactcccacaacccatatatcgcaccaattgcagaatcatacgaacttttctcagctaaggatagaaattgtctgcatatggaaattgatatttctggtagtaatctaaagtatgaaacaggcgaccatatcgcgatctggcctaccaacccaggtgaagaggtcaacaaatttcttgacattctagatctgtctggtaagcaacattccgtcgtaacagtgaaagccttagaacctacagccaaagttccttttccaaatccaactacctacgatgctatattgagataccatctggaaatatgcgctccagtttctagacagtttgtctcaactttagcagcattcgcccctaatgatgatatcaaagctgagatgaaccgtttgggatcagacaaagattacttccacgaaaagacaggaccacattactacaatatcgctagatttttggcctcagtctctaaaggtgaaaaatggacaaagataccattttctgctttcatagaaggccttacaaaactacaaccaagatactattctatctcttcctctagtttagttcagcctaaaaagattagtattactgctgttgtcgaatctcagcaaattccaggtagagatgacccattcagaggtgtagcgactaactacttgttcgctttgaagcagaaacaaaacggtgatccaaatccagctccttttggccaatcatacgagttgacaggaccaaggaataagtatgatggtatacatgttccagtccatgtaagacattctaactttaagctaccatctgatccaggcaaacctattatcatgatcggtccaggtaccggtgttgccccttttagaggcttcgtccaagagagggcaaaacaagccagagatggtgtagaagttggtaaaacactgctgttctttggatgtagaaagagtacagaagatttcatgtatcaaaaagagtggcaagagtacaaggaagctcttggcgacaaattcgaaatgattacagctttttcaagagaaggatctaaaaaggtttatgttcaacacagactgaaggaaagatcaaaggaagtttctgatcttctatcccaaaaagcatacttctacgtttgcggagacgccgcacatatggcacgtgaagtgaacactgtgttagcacagatcatagcagaaggccgtggtgtatcagaagccaagggtgaggaaattgtcaaaaacatgagatcagcaaatcaataccaagtgtgttctgatttcgtaactttacactgtaaagagacaacatacgcgaattcagaattgcaagaggatgtctggagttaa

SEQ ID NO: 84 - protein, 713 aa, Gibberella fujikuroi; identical to SEQ ID NO: 48

SEQ ID NO: 85 - DNA, 1578 bp, Sphaceloma manihoticola
atgatggatgataccacttctccatactctacctaccattccgttaggtccattagaaatcaatctgcttgggctttggctccaattgctgttttcatttgttacgttgtcttgagacacaacagaaagtctgttccagctgcttctgctggttctcattctattttggaaccattgtggttggccagattgagattcattagagactccagattcatcatcggtcaaggttactctaagttcaaggataccattttcaaggttaccaaggttggtgccgatattatagttgttgctcctaagtacgtcgaagagatcagaagattgtctagagatactggtagatccgttgaaccattcattcatgatttcgccggtgaattattgggtggtttgaattttttggagtccgacttgcaaaccagagttgttcaacaaaagttgaccccaaacttgaaaaccatcgttccagttatggaagatgagatgcattacgctttggtttccgaattggattcttgtttggatggttctgaacattggaccagagttgatatgatccacatgttgtctagaatcgtgtccagaatttccgccagaattttcttgggtcctaagtactgtagaaacgacttgtggttgaaaactactgctgagtacactgagaacttgttcttgactggtactttgttgagattcgtcccaagaatgttgcaaaaatggattgctccattgctaccatccttcagacaattgcaagaaaacagacaagctgccagaaagatcatctctgaaattttgactgatcaccagccagaaaaacatgacgaaacatctgataatggtgatccatacccagatatcttgaccttgatgtttcaagctgctaggggtaaagaaaaggacattgaagatattgcccaacacaccttgttgttgtccttatcttctattcataccaccgctttgactatgactcaagccttgtatgatttgtgtgcttacccacaatatttggatccagttaagcacgaaattgccgataccttgcaatctgaaggttcttggtctaaagctatgttggataagttgcacatgatggacagtttgttgagagaatcccaaagattgtctccagttttcttgttgaccttcaacagaatcttgcatactccattgactttgtccaacggtattcatttgccaaagggtactagaattgctgctccatctgatgctattttgaacgatccatctttggttccaggtccacaaccagctgatacttttgatcctttcaggtacattaaccactctactggtgatgctaaaaagaccaagactaacttccaaactacctccttgcaaaacatggcttttggttatggtaaatacgcttgtccaggtagattttacgttgccaacgaaatcaaattggtcttgggtcatttgttgatgcactacgaattcaaatttccaccaggtatgggtagaccagttaactctactgttgatactgatatgtacccagatttgggtgccagattattggtcagaaaaagaaagatggaagaatga

SEQ ID NO: 86 - protein, 525 aa, Sphaceloma manihoticola
MMDDTTSPYSTYHSVRSIRNQSAWALAPIAVFICYVVLRHNRKSVPAASAGSHSILEPLWLARLRFIRDSRFIIGQGYSKFKDTIFKVTKVGADIIVVAPKYVEEIRRLSRDTGRSVEPFIHDFAGELLGGLNFLESDLQTRVVQQKLTPNLKTIVPVMEDEMHYALVSELDSCLDGSEHWTRVDMIHMLSRIVSRISARIFLGPKYCRNDLWLKTTAEYTENLFLTGTLLRFVPRMLQKWIAPLLPSFRQLQENRQAARKIISEILTDHQPEKHDETSDNGDPYPDILTLMFQAARGKEKDIEDIAQHTLLLSLSSIHTTALTMTQALYDLCAYPQYLDPVKHEIADTLQSEGSWSKAMLDKLHMMDSLLRESQRLSPVFLLTFNRILHTPLTLSNGIHLPKGTRIAAPSDAILNDPSLVPGPQPADTFDPFRYINHSTGDAKKTKTNFQTTSLQNMAFGYGKYACPGRFYVANEIKLVLGHLLMHYEFKFPPGMGRPVNSTVDTDMYPDLGARLLVRKRKMEE

SEQ ID NO: 87 - DNA, 1581 bp, Fusarium proliferatum
atgaccaaccactcttcatcctactactacgaattctacaaggatcactcccacacctttagaagatctatgtctgagaataccttgatctcttcttgtttggctttggctacttgcgctattttgttgtctattcaatggttgaagccacaaccattgatcatggttaatggtagaaagttcggtgagttgtccaatgttagagctaagagggattttacttttggtgctagacagttgttggagaagggttttaagatgtctccagataagccattcagaatcatgggtgatgttggtgaattgcatattttgccaccaaagtacgcttacgaagtcagaaacaacgaaaagttgtctttcactatggctgctttcaagtggttttatgctcatttgccaggtttcgaaggtttcagagaaggtactaatgaatcccacatcatgaagttggttgccagacatcaattgactcatcaattgacattggttaccggtgctgtttctgaagaatgtgctttggttttgaaggatgtttacaccgattctccagaatggcatgatattactgctaaggatgctaacatgaagttcatggctagaatcaccttcagagtgttcttgggtaaagaaatgtgtagaaacccacagtggttgagaattacttctacctatgctgttattgccttcagagctgttgaagaattgagattgtggccatcttggttaagaccagttgttcaatggtttatgccacattgcactcaatctagagctttggttcaagaagctagagatttgatcaaccctttgttggaaagaagaagagaagaaaaggctgaagctgaaagaactggtgaaaaggttacttacaacgatgctgttgaatggttggatgatttggctagagaaaaaggtgttggttatgatccagcttgtgctcaattgtctttgtctgttgctgctttacattctaccactgatttcttcacccaagtcatgttcgatattgctcaaaacccagaattgatcgaaccattgagagaagaaatcatctccgttttgggtaaacaaggttggtctaagaactccttgtacaacttgaagttgatggactccgtcttgaaagaatcccaaagattgaagccaattgccattgcttctatgagaagattcactacccataacgttgaattgtccgatggtgttattttgccaaagaacaagttgaccttggtttccgctcatcaacattgggatccagaatattacaaggacccattgaagttcgatggttacagattcttcaacatgagaagggaaccaggtaaagaatctaaggctcaattggtttctgctaccccagatcatatgggttttggttatggtttacatgcttgtccaggtagatttttcgcttccgaagaaatcaagattgccttgtcccatatcttgttgaagtacgattttaagccagtcgagggttcttctatggaacctagaaagtatggtttgaacatgaacgctaatccaaccgctaaattgtccgtcagaagaagaaaagaagagatcgccatttga

SEQ ID NO: 88 - protein, 526 aa, Fusarium proliferatum
MTNHSSSYYYEFYKDHSHTFRRSMSENTLISSCLALATCAILLSIQWLKPQPLIMVNGRKFGELSNVRAKRDFTFGARQLLEKGFKMSPDKPFRIMGDVGELHILPPKYAYEVRNNEKLSFTMAAFKWFYAHLPGFEGFREGTNESHIMKLVARHQLTHQLTLVTGAVSEECALVLKDVYTDSPEWHDITAKDANMKFMARITFRVFLGKEMCRNPQWLRITSTYAVIAFRAVEELRLWPSWLRPVVQWFMPHCTQSRALVQEARDLINPLLERRREEKAEAERTGEKVTYNDAVEWLDDLAREKGVGYDPACAQLSLSVAALHSTTDFFTQVMFDIAQNPELIEPLREEIISVLGKQGWSKNSLYNLKLMDSVLKESQRLKPIAIASMRRFTTHNVELSDGVILPKNKLTLVSAHQHWDPEYYKDPLKFDGYRFFNMRREPGKESKAQLVSATPDHMGFGYGLHACPGRFFASEEIKIALSHILLKYDFKPVEGSSMEPRKYGLNMNANPTAKLSVRRRKEEIAI

SEQ ID NO: 89 - DNA, 1581 bp, Gibberella fujikuroi
atggccaaccattcttcatcctactaccatgaattctacaaggatcattcccataccgttttgaccttgatgtctgaaaagccagttatcttgccatccttgattttgggtacttgtgctgttttgttgtgcatccaatggttgaaaccacaaccattgattatggtcaacggtagaaagttcggtgaattgtctaatgttagagccaagagggattttacttttggtgccagacaattgctagagaagggtttgaaaatgtctccagataagccattcagaatcatgggtgatgttggtgaattgcatattttgccaccaaagtacgcttacgaagtcagaaacaacgaaaagttgtctttcactatggctgctttcaagtggttttatgctcatttgccaggtttcgaaggtttcagagaaggtactaatgaatcccacatcatgaagttggttgccagacatcaattgactcatcaattgacattggttaccggtgctgtttctgaagaatgtgctttggttttgaaggatgtttacaccgattctccagaatggcatgatattactgctaaggatgctaacatgaagttgatggctagaatcacctctagagtgttcttgggtaaagaaatgtgtagaaacccacagtggttgagaattacttctacctatgctgttattgccttcagagctgttgaagaattgagattgtggccatcttggttaagaccagttgttcaatggtttatgccacattgcactcaatctagagctttggttcaagaagctagagatttgatcaaccctttgttggaaagaagaagagaagaaaaggctgaagctgaaagaactggtgaaaaggttacttacaacgatgctgttgaatggttggatgatttggctagagaaaaaggtgttggttatgatccagcttgtgctcaattgtctttgtctgttgctgctttacattctaccactgatttcttcacccaagtcatgttcgatattgctcaaaacccagaattgatcgaaccattgagggaagaaattattgccgttttgggtaaacaaggctggtctaagaattccttgtacaacttgaagttgatcgactccgtcttgaaagaatcccaaagattgaagccaattgccattgcttctatgagaagattcactacccataacgttaagttgtccgatggtgttattttgccaaagaacaagttgaccttggtttccgctcatcaacattgggatccagaatattacaaggacccattgaagttcgatggttacagattcttcaacatgagaagggaaccaggtaaagaatctaaggctcaattggtttctgctaccccagatcatatgggttttggttatggtttacatgcttgtccaggtagatttttcgcttccgaagaaatcaagattgccttgtcccatatcttgttgaagtacgattttaagccagtcgagggttcttctatggaacctagaaagtatggtttgaacatgaacgctaatccaaccgctaaattgtccgtcagaagaagaaaagaagagatcgccatttga

SEQ ID NO: 90 - protein, 526 aa, Gibberella fujikuroi
MANHSSSYYHEFYKDHSHTVLTLMSEKPVILPSLILGTCAVLLCIQWLKPQPLIMVNGRKFGELSNVRAKRDFTFGARQLLEKGLKMSPDKPFRIMGDVGELHILPPKYAYEVRNNEKLSFTMAAFKWFYAHLPGFEGFREGTNESHIMKLVARHQLTHQLTLVTGAVSEECALVLKDVYTDSPEWHDITAKDANMKLMARITSRVFLGKEMCRNPQWLRITSTYAVIAFRAVEELRLWPSWLRPVVQWFMPHCTQSRALVQEARDLINPLLERRREEKAEAERTGEKVTYNDAVEWLDDLAREKGVGYDPACAQLSLSVAALHSTTDFFTQVMFDIAQNPELIEPLREEIIAVLGKQGWSKNSLYNLKLIDSVLKESQRLKPIAIASMRRFTTHNVKLSDGVILPKNKLTLVSAHQHWDPEYYKDPLKFDGYRFFNMRREPGKESKAQLVSATPDHMGFGYGLHACPGRFFASEEIKIALSHILLKYDFKPVEGSSMEPRKYGLNMNANPTAKLSVRRRKEEIAI

SEQ ID NO: 91 - DNA, 774 bp, Bradyrhizobium japonicum
atgtccgccttccaaaaagaaaccgttttgtctgttagacactggaccgaatctttgttttcattcactgctactagagatccaggtttcagatttcaaaatggtcaattcgccatgatcggtttggaagttgaaggtaaaccattgatgagagcttactctatggcttctgctaatcatgaagaagccttggaattcttctcaatcaaggttcaagatggtccattgacttccagattgcaaaagattagagaaggcgatatcatcttggttggtagaaaagctactggtactttgattaccggtaacttgattccaggtaagaggttgttgttgttgtctactggtactggtttggctccatttgcttcattgattaaggatccagatgtctacgaaaactacgaaactatcgttttggctcatggttgcagacaagtttctgaattggcttatggtgaacacttggttgaaggtttgagaaaccatgaatttttcggtccattgatcagagacaagttggtttattacccaaccgttactagagagccattcagaaatagaggtagaatcaccgatttgattgcctctaatcagttgttcgatgatattggtcaaggtggtttggatatcgaaaccgatagaattatgttgtgtggttctccaggtatgttggaagaattgcatgctatgtttgctgctagaggttttgttgaaggtaatcattctcaaccaggtcacttcgttattgaaaaggctttcgttcagaggtaa

SEQ ID NO: 92 - protein, 257 aa, Bradyrhizobium japonicum
MSAFQKETVLSVRHWTESLFSFTATRDPGFRFQNGQFAMIGLEVEGKPLMRAYSMASANHEEALEFFSIKVQDGPLTSRLQKIREGDIILVGRKATGTLITGNLIPGKRLLLLSTGTGLAPFASLIKDPDVYENYETIVLAHGCRQVSELAYGEHLVEGLRNHEFFGPLIRDKLVYYPTVTREPFRNRGRITDLIASNQLFDDIGQGGLDIETDRIMLCGSPGMLEELHAMFAARGFVEGNHSQPGHFVIEKAFVQR

SEQ ID NO: 93 - DNA, 1587 bp, Phaeosphaeria sp.
atgaagcacatcgatgtcatgaacttcatctccaagatttgctcttggtctaaagattctccaggtttcgttttgttgatctccatcttggttatcttgggttccgttactttcattccaaagtgtggtagaagatctgcttttgatgctttgccaatcgttaacaagccaaagtttggtccaatcttctccattattgctaggtggagattcatccaccaatccaagaaaattttggaagagggtcaaaagtgctactccaatagaccttttagaatttggactgattggggtgaagttttgatgttgactccagattatgcccacgaaattagaaacgatccacacttgtctttttcaggtgccgttaagattgatggtcatgctgatattccaggtttcgaaactgttaagttgatctcccatccagacaacttgattcaattggttgctagaaagcaattgaccagacatttggctgctgttattcaaccattgtcctctgttactgaagaagccttgattaagaacttgggcaaatctcaagaatggtccgaaatctacttgaagtacgccgttttggatattatcgccagattgtcatctaggatctactttggtgagttgttgtaccaaaacgaagagtggttgtctatcgttaagaattacgctactcatttcttcaccgcctcttccgatttgagaaaagttccatgggctttcagatctttggttcattggtttgttccatcttgcagagctttgagattggaaagatacaacgctagaagagttttggaaccagttatctctcaaagaaggcaattgaaagaagctgctaaaactgctggtggtactccattgcattttgaagatgctattgaatgggctgaagttgaagctagagttaagggtactaagtacgatccagttatcttccaattgaccttgtccttgttggctattcataccacttacgacttgttggaaatgtgcatgattgatttggctaaaagaccagactgcatcgaggacttgagaaaagaagttattaccgtcttgagaaaggatggttggacaaaaaatgccttgtacaacatgaagttgttggactccgctatcaaagaatcccaaagattgaaaccaggttccatcacttctatgagaagatacgctacttccgatgtccaattgagagatggtgttgttttgaaaaagggcaacagattgaacgttttgaccttgcatagatccccagatttgtttccatctccagatacttatgacccatacaggttctacaacattagaggtcaaccaggtaaagaaaactgggctcaattggtttctacctccgttgaacatatgggttttggtcatggtgaacattcttgtccaggtagattttttgctgccaacgaaatcaaagttgccttggctcatattttggttaagtacgattggaagttgtccgatgaagctggtggttgtactgaagttaagggtatggttgaaaaagctggttccaaggttaagatcttggtcagacaaagacaagatgtcgaatccgttttggatgaagcttga

SEQ ID NO: 94 - protein, 528 aa, Phaeosphaeria sp.
MKHIDVMNFISKICSWSKDSPGFVLLISILVILGSVTFIPKCGRRSAFDALPIVNKPKFGPIFSIIARWRFIHQSKKILEEGQKCYSNRPFRIWTDWGEVLMLTPDYAHEIRNDPHLSFSGAVKIDGHADIPGFETVKLISHPDNLIQLVARKQLTRHLAAVIQPLSSVTEEALIKNLGKSQEWSEIYLKYAVLDIIARLSSRIYFGELLYQNEEWLSIVKNYATHFFTASSDLRKVPWAFRSLVHWFVPSCRALRLERYNARRVLEPVISQRRQLKEAAKTAGGTPLHFEDAIEWAEVEARVKGTKYDPVIFQLTLSLLAIHTTYDLLEMCMIDLAKRPDCIEDLRKEVITVLRKDGWTKNALYNMKLLDSAIKESQRLKPGSITSMRRYATSDVQLRDGVVLKKGNRLNVLTLHRSPDLFPSPDTYDPYRFYNIRGQPGKENWAQLVSTSVEHMGFGHGEHSCPGRFFAANEIKVALAHILVKYDWKLSDEAGGCTEVKGMVEKAGSKVKILVRQRQDVESVLDEA

SEQ ID NO: 95 - DNA, 1602 bp, Rhizobium etli
atggatgttcaagatacaaccgctgcttgtcatgatgcttttgctgaattggcttctccagcttgtattcaagatccatatcctttcatgagatggttgagagaacatgatccagttcatagagctgcttcaggtttgtttttgttgtctagacatgctgatatctactgggcttttaaagctactggtgatgcttttagaggtccagctccatctgaattggctagatattttccaagagctgcctcttctttgtccttgaatttgttggcttctaccttggctatgaaggaaccaccaactcatacaagattgagaagattgatctccagagatttcaccgttggtcaaattgataatttgaggccatccattgctagaatcgttgctgctagattggatggtatggctccagctttggaaagaggtgaagctgttgacttgcatagagaatttgctttggctttgccaatgttggtttttgctgaactatttggtatgccacaagacgacgtttttgaattgtctgctatcgtttccgctatcttggaaggtttgtctccacatgcttcagatccacaattggctgctgctgatgttgcttctgctagagttaaggcttatttcggtgatttgatcttgagaaagagagccgatccaagaagagatatcgtttctactttggttggtgctcatactgatgatgctgatactttgtctgatgccgaattgatttctatgttgtggggtatgttgttgggtggttttgctactactgctgctactattgatcatgctgttttggctatgttggcttacccagaagaaagacattggttgcaaggtgatgctgctggtgttgaagcttttgttgaagaggttttgagatgtgaagctccagctatgttttcctcaattccaagaattgcccaaagggatattgaattgcatggtgttgttattccaaaggatgccgatgttagagttttgattgctgctggtaatagagatccagatgcatttgctgatccagatagatttgatccagttaggttttacggtactagaccaggtatgtcatctgatggtaagatcatgttgtctttcggtcatggtattcatttctgtttgggtgctcaattggctagagttcaattggctgaatctttgccacaaattcaagctagatttccaactttggctttggctgaacaacctactagagaaccatctgcttttttgagaactttcagagctttgccagttagattgcatgctcaagctgctgctgaagttagagttgttgttgatcaagatttgtgtggtactaccggtcaatgtgttttgactttgccaggtacttttagacaaagggaaccagatggtgttgctgaagtatgtatggctactgttccacaagctttacatgctgctgttagattggctgcttctcaatgtccagttgctgctattagagttattgaatctgaagctggtgatgatcattgcactaatccaggtccaacaccatctccagctgatgctgaaagacatgctgctaaagatttgagaaatccaggtgaacatgacggcactatttga

SEQ ID NO: 96 - protein, 533 aa, Rhizobium etli
MDVQDTTAACHDAFAELASPACIQDPYPFMRWLREHDPVHRAASGLFLLSRHADIYWAFKATGDAFRGPAPSELARYFPRAASSLSLNLLASTLAMKEPPTHTRLRRLISRDFTVGQIDNLRPSIARIVAARLDGMAPALERGEAVDLHREFALALPMLVFAELFGMPQDDVFELSAIVSAILEGLSPHASDPQLAAADVASARVKAYFGDLILRKRADPRRDIVSTLVGAHTDDADTLSDAELISMLWGMLLGGFATTAATIDHAVLAMLAYPEERHWLQGDAAGVEAFVEEVLRCEAPAMFSSIPRIAQRDIELHGVVIPKDADVRVLIAAGNRDPDAFADPDRFDPVRFYGTRPGMSSDGKIMLSFGHGIHFCLGAQLARVQLAESLPQIQARFPTLALAEQPTREPSAFLRTFRALPVRLHAQAAAEVRVVVDQDLCGTTGQCVLTLPGTFRQREPDGVAEVCMATVPQALHAAVRLAASQCPVAAIRVIESEAGDDHCTNPGPTPSPADAERHAAKDLRNPGEHDGTI

SEQ ID NO: 97 - DNA, 1605 bp, Oryza sativa
atggttgttgttgttgctgcagctatggctgctgcttctttgtgttgtggtgttgctgcttacttgtattacgttttgtggttggctccagaaagattgagagcacatttgagaaggcaaggtattggtggtccaactccatcttttccatatggtaatttggccgatatgagatcacatgctgctgctgcagctggtggtaaagctactggtgaaggtagacaagagggtgatatagttcatgattacagacaagctgtgttcccattctacgaaaattggagaaaacaatacggtccagtgttcacttactctgttggtaatatggttttcttgcacgtttccagaccagatatcgttagagaattgtctttgtgcgtttccttggacttgggtaaatcttcttatatgaaggctacccaccaacctttgtttggtgaaggtattttgaagtctaatggtaacgcttgggctcaccaaagaaaattgattgctccagaattcttcccagataaggttaagggtatggttgatttgatggttgattccgctcaagtcttggtttcttcatgggaagatagaatcgatagatctggtggtaatgccttggatttgatgatcgatgatgatatcagagcttactccgccgatgttatttctagaacttgtttcggttcctcctacgttaagggtaagcaaattttcgacatgatcagagagttgcaaaagaccgtttctaccaagaagcaaaacttgttggctgaaatgactggcttgtcttttttgtttccaaaggcttctggtagagctgcttggagattgaatggtagagttagagctttgattttggacttggttggtgaaaatggtgaagaggatggtggtaatttgttgtctgctatgttgagatctgctagaggtggtggtggtggcggtggtgaagttgcagctgctgctgaagattttgttgttgataactgcaagaacatctacttcgctggttatgaatctactgctgttactgctgcttggtgtttgatgttgttggctttacatccagaatggcaagatagagttagagatgaagttcaagctgcttgttgcggtggtggtggaagatctccagattttccagctttacaaaagatgaagaacttgaccatggtgatccaagaaactttgagattatatccagctggtgccgttgtttctagacaagctttgagagaattatccttgggtggtgttagagttccaagaggtgttaatatctacgttccagtttctaccttgcatttggatgctgaattgtggggtggtggtgctggtgctgctgaatttgatccagctagatttgctgatgctagaccaccattgcatgcttatttgccatttggtgccggtgctagaacatgtttgggtcaaacttttgctatggccgaattgaaggttttgttgtctttggttttgtgcagattcgaagttgctttgtctccagaatatgttcattctccagctcacaagttgatcgttgaagctgaacatggtgttagattggtcttgaagaaagtcagatctaagtgtgattgggctggtttcgattga

SEQ ID NO: 98 - protein, 534 aa, Oryza sativa
MVVVVAAAMAAASLCCGVAAYLYYVLWLAPERLRAHLRRQGIGGPTPSFPYGNLADMRSHAAAAAGGKATGEGRQEGDIVHDYRQAVFPFYENWRKQYGPVFTYSVGNMVFLHVSRPDIVRELSLCVSLDLGKSSYMKATHQPLFGEGILKSNGNAWAHQRKLIAPEFFPDKVKGMVDLMVDSAQVLVSSWEDRIDRSGGNALDLMIDDDIRAYSADVISRTCFGSSYVKGKQIFDMIRELQKTVSTKKQNLLAEMTGLSFLFPKASGRAAWRLNGRVRALILDLVGENGEEDGGNLLSAMLRSARGGGGGGGEVAAAAEDFVVDNCKNIYFAGYESTAVTAAWCLMLLALHPEWQDRVRDEVQAACCGGGGRSPDFPALQKMKNLTMVIQETLRLYPAGAVVSRQALRELSLGGVRVPRGVNIYVPVSTLHLDAELWGGGAGAAEFDPARFADARPPLHAYLPFGAGARTCLGQTFAMAELKVLLSLVLCRFEVALSPEYVHSPAHKLIVEAEHGVRLVLKKVRSKCDWAGFD

SEQ ID NO: 99 - DNA, 2091 bp, Phaeosphaeria sp.
atggctcaattggataccttggatatcgttgttttggctgctttgccattgggtactgttgcttattttactaagggtacttactgggctgtttctgctgatccatatgctaatccattgactaatgctaatggtgctgctagagctggtaagtccagaaacattattgaaaagttggaagaatccgacaagaactgcgttgttttttacggttctcaaactggtactgctgaagattatgcttccaggttgtctaaagaaggtcattctagattcggtttgaacaccatggttgctgatttggaagaatacgatttcgacaacttggactcattcccagaagataagttggctgtttttgttttggctacttatggtgaaggtgaacctactgataatgccgttgaattctacgaattcatcggttccgaagatatcactttttctgatggtggttccatcgatgataagccattgtctaagttgaactacgttgcttttggtttgggtaacaacacctacgaacattacaactccatggttagaaacgtcgataagtacttgacaaagttgggtgctactagattgggttctgccggtgaaggtgatgatggtgctggtactatggaagaagattttttggcttggaaagaacctatgtgggctgctgttgctgaaaagatgaatttggaagaaagagaagctgaatacgaagccgttttcgaagttactgaaaagccagatttgaacgctcaagatgatactgtttatttgggtgagccaaacaagaaccacttggaaggtaatcaaaagggtccattcaatgctaacaacccattcattgctccaatcgttgaatctcatgaactattcaccaccaaagaaagaaactgcttgcacatggaaattagcattggtggttctaacttgtcttacactaccggtgatcatattgctatttggccaaacaatgccggtaaagaagttgacagattcttcaaggttttgggcaaagaagataagagacataccgttattgctgtcagaggtttggatccaactgctaaagttccatttccatctccaactacttatgatgctgctgttagattccatttggaaattggtgctgctgtctctagacaattggtttctactattgctcaattcgccccaaacgaagatattaaggctgaaatggctaaattgggttccgataaggattacttcaagttgcaagttaccgacagaaacttgaatttggctcagttgttggaaatttgcggtaaaggtcaaccatggactaagattccattctcctttatgttcgaatccttgttgaagattcagccaaggtactactccatctcttcttcatctttggttcagaaggacaaggtttctattaccgctgttgttgaatctttggaaagaccaggtgctccacatgttttgaaaggtgttactaccaattacttgttggccttgaagcaaaagcaacatggtgatccaaatccagatccacatggtttgaattacgctattactggtccaagaaacaagtacgatggtatccatgttccagttcatgttagacactctaacttcaaattgccatccgatccatctaagccaatagttatggttggtccaggtactggtgttgctccttttagaggttttgttcaagaaagagctgctcaagctaaagctggtcataatgttggtaagaccattttgttcttcggttgcagaaaagcctctgaggatttcttgtatcaaaatgaatgggcccagtacaaagaagctttgggagataatttcgaaatctacaccgctttctctagagatggtccaaaaaaggtttacgtccagaaccatttggaagaacatggtgaagaagttaacaggttgttggaaaaaaaggcctacttctacgtttgtggtgatgctgctcatatggctagagatgttaataccttgttgggcaagttgatctccaagtacagaaatgtctctgaaactaagggtgaagaaatcgttaaggctatgagagcctctaatcagtaccaagaagatgtttggtcttaa

SEQ ID NO: 100 - protein, 696 aa, Phaeosphaeria sp.
MAQLDTLDIVVLAALPLGTVAYFTKGTYWAVSADPYANPLTNANGAARAGKSRNIIEKLEESDKNCVVFYGSQTGTAEDYASRLSKEGHSRFGLNTMVADLEEYDFDNLDSFPEDKLAVFVLATYGEGEPTDNAVEFYEFIGSEDITFSDGGSIDDKPLSKLNYVAFGLGNNTYEHYNSMVRNVDKYLTKLGATRLGSAGEGDDGAGTMEEDFLAWKEPMWAAVAEKMNLEEREAEYEAVFEVTEKPDLNAQDDTVYLGEPNKNHLEGNQKGPFNANNPFIAPIVESHELFTTKERNCLHMEISIGGSNLSYTTGDHIAIWPNNAGKEVDRFFKVLGKEDKRHTVIAVRGLDPTAKVPFPSPTTYDAAVRFHLEIGAAVSRQLVSTIAQFAPNEDIKAEMAKLGSDKDYFKLQVTDRNLNLAQLLEICGKGQPWTKIPFSFMFESLLKIQPRYYSISSSSLVQKDKVSITAVVESLERPGAPHVLKGVTTNYLLALKQKQHGDPNPDPHGLNYAITGPRNKYDGIHVPVHVRHSNFKLPSDPSKPIVMVGPGTGVAPFRGFVQERAAQAKAGHNVGKTILFFGCRKASEDFLYQNEWAQYKEALGDNFEIYTAFSRDGPKKVYVQNHLEEHGEEVNRLLEKKAYFYVCGDAAHMARDVNTLLGKLISKYRNVSETKGEEIVKAMRASNQYQEDVWS

SEQ ID NO: 101 - DNA, 2859 bp, Gibberella fujikuroi
atgccaggtaagattgaaaacggtactccaaaggatttgaaaaccggtaacgattttgtttccgctgctaagtctttgttggatagagcttttaagtcccaccattcttactacggtttgtgttctacttcttgccaagtttatgatactgcttgggttgctatgattccaaagactagagataacgtcaagcaatggttgttcccagaatgtttccactacttgttgaaaactcaagctgctgatggttcttggggttctttgccaactactcaaactgctggtattttggatactgcttctgctgttttggctttgttgtgtcatgctcaagaaccattgcaaatcttggatgtttctccagacgaaatgggtttgagaattgaacatggtgttaccagcttgaagagacaattggctgtttggaatgatgtcgaagataccaaccatatcggtgtcgaattcattattccagccttgttgtccatgttggaaaaagaattggatgtcccatctttcgaattcccatgcagatctattttggaaagaatgcacggtgaaaagttgggtcatttcgatttggaacaagtttacggtaagccatcctctttgttgcattctttggaagctttcttgggcaagttggatttcgatagattgtctcatcacttgtaccacggttctatgatggcttctccatcttctactgctgcttatttgattggtgctactaagtgggatgatgaagctgaagattacttgagacacgttatgagaaatggtgctggtcatggtaatggtggtatttctggtacttttccaactacccatttcgaatgctcttggattattgctaccttgttgaaggttggtttcaccttgaaacaaatcgatggtgatggtttgagaggtttgtctaccattttgttggaagctttgagagatgagaacggtgttattggttttgctccaagaactgctgatgttgatgatactgctaaagctttgttggccttgtccttggttaatcaaccagtttctccagatatcatgatcaaggttttcgaaggtaaggatcatttcactaccttcggttctgaaagagatccatctttgacttccaacttgcacgttttgttgtccttgttgaagcagtctaacttgtctcaataccacccacaaattctaaagactaccttgttcacttgtagatggtggtggggttctgatcattgtgttaaggataagtggaacttgtctcacttgtacccaactatgttgttggttgaagctttcactgaagtcttgcatttgattgacggtggtgaattgtcctctttgttcgatgaatctttcaagtgcaagatcggcttgtctattttccaagctgttttgagaatcatcttgacccaagataatgacggttcttggagaggttatagagaacaaacttgctacgctatcttggctttggttcaagctagacatgtttgtttcttcacccacatggttgatagattgcaatcctgtgttgatagaggtttctcttggttgaagtcttgctctttccattcccaagatttgacttggacttctaagactgcttacgaagttggttttgttgctgaagcttacaaattggctgctttacaatctgcctctttggaagttccagctgctactattggtcattctgttacttcagctgttccatcttctgatttggagaagtacatgagattggttagaaagaccgctttgttctctccattggatgaatggggtttgatggcctctattatcgaatcttctttcttcgtgccattgctacaagctcaaagagttgaaatctacccaagagataacatcaaggtcgacgaagataagtacttgtccattattccattcacctgggttggttgtaacaacagatctagaactttcgcttctaacagatggttgtacgacatgatgtacttgtctttgttgggttaccaaaccgatgagtatatggaagctgttgctggtccagtttttggtgatgtttctttgttgcaccaaaccatcgataaggttattgataacaccatgggtaacttggctagagctaatggtactgttcattctggtaatggtcatcaacatgagtctccaaacattggtcaagttgaagatactttgaccaggttcactaactctgttttgaaccacaaggatgtcttgaactcctcatcttctgatcaagataccttgagaagagaattcagaaccttcatgcatgcccatattacccaaatcgaagataactccagattctccaaacaagcttcttctgatgctttctcatctccagaacaatcttacttccaatgggttaattctaccggtggttctcatgttgcttgtgcttattcttttgctttctccaactgtttgatgtccgctaatttgttgcaaggtaaggatgcttttccatccggtactcaaaagtacttgatctcctctgttatgagacatgctaccaacatgtgtagaatgtacaacgatttcggttccattgctagagataatgccgaaagaaacgttaactccattcacttcccagaattcactttgtgtaacggtacttctcaaaacttggacgaaagaaaagagaggttgttgaagattgctacctacgaacaaggttacttggatagagcattggaagccttggaaagacaatctagagatgatgctggtgatagagctggttctaaagatatgagaaagttgaagatcgtcaagttgttctgtgatgttaccgacttgtatgatcagttgtacgttatcaaggacttgtcctcttcaatgaagtaa

SEQ ID NO: 102 - protein, 952 aa, Gibberella fujikuroi
MPGKIENGTPKDLKTGNDFVSAAKSLLDRAFKSHHSYYGLCSTSCQVYDTAWVAMIPKTRDNVKQWLFPECFHYLLKTQAADGSWGSLPTTQTAGILDTASAVLALLCHAQEPLQILDVSPDEMGLRIEHGVTSLKRQLAVWNDVEDTNHIGVEFIIPALLSMLEKELDVPSFEFPCRSILERMHGEKLGHFDLEQVYGKPSSLLHSLEAFLGKLDFDRLSHHLYHGSMMASPSSTAAYLIGATKWDDEAEDYLRHVMRNGAGHGNGGISGTFPTTHFECSWIIATLLKVGFTLKQIDGDGLRGLSTILLEALRDENGVIGFAPRTADVDDTAKALLALSLVNQPVSPDIMIKVFEGKDHFTTFGSERDPSLTSNLHVLLSLLKQSNLSQYHPQILKTTLFTCRWWWGSDHCVKDKWNLSHLYPTMLLVEAFTEVLHLIDGGELSSLFDESFKCKIGLSIFQAVLRIILTQDNDGSWRGYREQTCYAILALVQARHVCFFTHMVDRLQSCVDRGFSWLKSCSFHSQDLTWTSKTAYEVGFVAEAYKLAALQSASLEVPAATIGHSVTSAVPSSDLEKYMRLVRKTALFSPLDEWGLMASIIESSFFVPLLQAQRVEIYPRDNIKVDEDKYLSIIPFTWVGCNNRSRTFASNRWLYDMMYLSLLGYQTDEYMEAVAGPVFGDVSLLHQTIDKVIDNTMGNLARANGTVHSGNGHQHESPNIGQVEDTLTRFTNSVLNHKDVLNSSSSDQDTLRREFRTFMHAHITQIEDNSRFSKQASSDAFSSPEQSYFQWVNSTGGSHVACAYSFAFSNCLMSANLLQGKDAFPSGTQKYLISSVMRHATNMCRMYNDFGSIARDNAERNVNSIHFPEFTLCNGTSQNLDERKERLLKIATYEQGYLDRALEALERQSRDDAGDRAGSKDMRKLKIVKLFCDVTDLYDQLYVIKDLSSSMK

SEQ ID NO: 103 - DNA, 2880 bp, Gibberella fujikuroi
atgcacattttgacttacccatccggtaagattgaaaacggtactccaaaggatttgaaaaccggtaacgattttgtttccgctgctaagtctttgttggatagagcttttaagtcccaccattcttactacggtttgtgttctacttcttgccaagtttatgatactgcttgggttgctatgattccaaagactagagataacgtcaagcaatggttgttcccagaatgtttccactacttgttgaaaactcaagctgctgatggttcttggggttctttgccaactactcaaactgctggtattttggatactgcttctgctgttttggctttgttgtgtcatgctcaagaaccattgcaaatcttggatgtttctccagacgaaatgggtttgagaattgaacatggtgttaccagcttgaagagacaattggctgtttggaatgatgtcgaagataccaaccatatcggtgtcgaattcattattccagccttgttgtccatgttggaaaaagaattggatgtcccatctttcgaattcccatgcagatctattttggaaagaatgcacggtgaaaagttgggtcatttcgatttggaacaagtttacggtaagccatcctctttgttgcattctttggaagctttcttgggcaagttggatttcgatagattgtctcatcacttgtaccacggttctatgatggcttctccatcttctactgctgcttatttgattggtgctactaagtgggatgatgaagctgaagattacttgagacacgttatgagaaatggtgctggtcatggtaatggtggtatttctggtacttttccaactacccatttcgaatgctcttggattattgctactttgttgaagggtggtttcaccttgaaacaaattgatggtgatggtttgagaggcttgtctaccattttgttggaagctttgagagatgagaacggtgttattggttttgctccaagaactgctgatgttgatgatactgctaaagctttgttggccttgtccttggttaatcaaccagtttctccagatatcatgatcaagggttttgaaggtaaggatcatttcactaccttcggttctgaaagagatccatctttgacttccaacttgcacgttttgttgtctttgccaggtaagcaatctaacttgtctcaataccatccacagatcttgaaaactaccttgttcacttgtagatggtggtggggttctgatcattgtgttaaggataagtggaacttgtctcacttgtacccaactatgttgttggttgaagctttcactgaagtcttgcatttgattgacggtggtgaattgtcctctttgttcgatgaatctttcaagtgcaagatcggcttgtctattttccaagctgttttgagaatcatcttgacccaagataatgacggttcttggagaggttatagagaacaaacttgctacgctatcttggctttggttcaagctagacatgtttgtttcttcacccacatggttgatagattgcaatcctgtgttgatagaggtttctcttggttgaagtcttgctctttccattcccaagatttgacttggacttctaagactgcttacgaagttggttttgttgctgaagcttacaaattggctgctttacaatctgcctctttggaagttccagctgctactattggtcattctgttacttcagctgttccatcttctgatttggagaagtacatgagattggttagaaagaccgctttgttctctccattggatgaatggggtttgatggcctctattatcgaatcttctttcttcgtgccattgctacaagctcaaagagttgaaatctacccaagagataacatcaaggtcgacgaagataagtacttgtccattattccattcacctgggttggttgtaacaacagatctagaactttcgcttctaacagatggttgtacgacatgatgtacttgtctttgttgggttaccaaaccgatgagtatatggaagctgttgctggtccagtttttggtgatgtttctttgttgcaccaaaccatcgataaggttattgataacaccatgggtaacttggctagagctaatggtactgttcattctggtaatggtcatcaacatgagtctccaaacattggtcaagttgaagatactttgaccaggttcactaactctgttttgaaccacaaggatgtcttgaactcctcatcttctgatcaagataccttgagaagagaattcagaaccttcatgcatgcccatattacccaaatcgaagataactccagattctccaaacaagcttcttctgatgctttctcatctccagaacaatcttacttccaatgggttaattctaccggtggttctcatgttgcttgtgcttattcttttgctttctccaactgtttgatgtccgctaatttgttgcaaggtaaggatgcttttccatccggtactcaaaagtacttgatctcctctgttatgagacatgctaccaacatgtgtagaatgtacaacgatttcggttccattgctagagataatgccgaaagaaacgttaactccattcacttcccagaattcactttgtgtaacggtacttctcaaaacttggacgaaagaaaagagaggttgttgaagattgctacctacgaacaaggttacttggatagagcattggaagccttggaaagacaatctagagatgatgctggtgatagagctggttctaaagatatgagaaagttgaagatcgtcaagttgttctgtgatgttaccgacttgtatgatcagttgtacgttatcaaggacttgtcctcttcaatgaagtaa

SEQ ID NO: 104 - protein, 959 aa, Gibberella fujikuroi
MHILTYPSGKIENGTPKDLKTGNDFVSAAKSLLDRAFKSHHSYYGLCSTSCQVYDTAWVAMIPKTRDNVKQWLFPECFHYLLKTQAADGSWGSLPTTQTAGILDTASAVLALLCHAQEPLQILDVSPDEMGLRIEHGVTSLKRQLAVWNDVEDTNHIGVEFIIPALLSMLEKELDVPSFEFPCRSILERMHGEKLGHFDLEQVYGKPSSLLHSLEAFLGKLDFDRLSHHLYHGSMMASPSSTAAYLIGATKWDDEAEDYLRHVMRNGAGHGNGGISGTFPTTHFECSWIIATLLKGGFTLKQIDGDGLRGLSTILLEALRDENGVIGFAPRTADVDDTAKALLALSLVNQPVSPDIMIKGFEGKDHFTTFGSERDPSLTSNLHVLLSLPGKQSNLSQYHPQILKTTLFTCRWWWGSDHCVKDKWNLSHLYPTMLLVEAFTEVLHLIDGGELSSLFDESFKCKIGLSIFQAVLRIILTQDNDGSWRGYREQTCYAILALVQARHVCFFTHMVDRLQSCVDRGFSWLKSCSFHSQDLTWTSKTAYEVGFVAEAYKLAALQSASLEVPAATIGHSVTSAVPSSDLEKYMRLVRKTALFSPLDEWGLMASIIESSFFVPLLQAQRVEIYPRDNIKVDEDKYLSIIPFTWVGCNNRSRTFASNRWLYDMMYLSLLGYQTDEYMEAVAGPVFGDVSLLHQTIDKVIDNTMGNLARANGTVHSGNGHQHESPNIGQVEDTLTRFTNSVLNHKDVLNSSSSDQDTLRREFRTFMHAHITQIEDNSRFSKQASSDAFSSPEQSYFQWVNSTGGSHVACAYSFAFSNCLMSANLLQGKDAFPSGTQKYLISSVMRHATNMCRMYNDFGSIARDNAERNVNSIHFPEFTLCNGTSQNLDERKERLLKIATYEQGYLDRALEALERQSRDDAGDRAGSKDMRKLKIVKLFCDVTDLYDQLYVIKDLSSSMK

SEQ ID NO: 105 - DNA, 2889 bp, Sphaceloma manihoticola
atgttggaaggtattggtatcggttcttctccacaatctttgttggattctgccaaggatttgattgctgaagcttgttctagaaccgatccattttatggtttgtctaccgcttcttgtcaaacttatgatactgcttgggttgccatggttgttaagagattggaatctggtgaagatgcttgggctttcccacaatcttttaggtatattttggaagcccaaacttctggtggtggttggggtgatccaaaagcttctaaaactgttggtattttggataccgctgctgctttgttggcattatacagacatttggatagaccattgcaaatcaccgaagttaccagaatggatgtcgaatccagaattgaaaaggcttctacctctttggtgtcccaattgcaacaatgggatgatttggttgaatccaaccatatcggtgtcgaattgattttgccttccttgttggaacaattgagacaaatcaatccagtcttgcactctactagattcaaggctgaacaagatttgaccagaatgcacgaagaaaagttgagacacttcgatgtctctagcttgtattcttctagaccatcttctgccttgcattctttggaagcttttttgggtaaattggacttcgatagagttggtcatcacttgtatcatggttctatgatggcttctccatcttctactgctgcttatttgattggtgcttctacttacgattctaccgctgaagcttacttgtcccatattttgaaatgtaccgctaaaggttctccaggtggtattccaggtactttcccaattactaatttcgaatactcctggattaccgccactttgttgagagattgctttgcttatgaagatttggctggtccatctttggattgcattggtcaaactttggaagaagctttacaagctggtaagggtgttattggttttgctccaagaactgctgatgttgatgatactgctaaaggtttgttggctttgacctctatgagaagatatggtcatgctgatccaaagccaatgatcaaggttttcgaaagagaagatcatttcaccaccttcggttctgaaagagatccatcttttacctctaactgccacgttttgttgtctttgttggctcaagaatctgacttgccattatacagagcccaaatctacaaggctactaagttcttgtgtgacttcttgttctatagggatggtccattgaaagataagtggcatatgacttcatcctacccatctatgttgttggttgaagctttttccgagttgttgagattgcaagacgaacaaaagttcgaacagttgttgacctctgatgaacaacacagagttttcatcgttttgttccaaacctgtttgagaaccttgttggtccaatctgaagatggttcttggtctggttgtactgaacaaacttctcatgctgtatgtactttggctagagcttggagattgaacttgttcattgacttaagaccagacttgcaagttgctattcaagccggtattcaatacttggatagacctgaagctcaaatgggtcaaaactggacttctaagactgtttactccgttgatttggttggtaaggcttacattttggctgctagaaaaatggcccaagatttgtctgatagaactccatttggtcctaagagggaagatttcatgtctttgaagaagttcaccacctacttggaaacctctaaaagattgccattattgcaagctactccaccttggcaaattattgcttctttgactgaatccgctttgttcttgcctttgttgaggaaagaaaaagaagccatctttccaagggatggtactatgttgactccagatgattacttggatatcattccatacacctgggttatttgcggtaacagaattgatgttcatacctctccatctttggccttggatatgatgttgttgtctatgtacggttaccagaacgacgaattctttgaaactcatgctatggctggtcattaccaatctggttctgatttgaagagattggttgatgatgtcttgcaacagaacattccaaaatgtgctgaaccatctaacggttcttctaaacatgatactggtaaccagtctagaactgctcaagaagctgctatttctttgccagaaatgtctgctggtttgaacagattcatctcctacatcttgaaacatccattggttgctcaagctcatccaaactctaaatccgaattgcacagagaattgcaagctttcttgcatgctcattctgatcaatctgacgaaaacagaagattcgctgcccaagaagaaaaagacgaattgcaatctccatcccaaaccttgtttcaatacgttagatctactggtggtgatcatgttgcttgtgcttactctttgtctttcatgttgtgcatcatctcttcatccttgtgtgatggtggtgaagtttttcaaactgccgaagaaaagtatttggctgctgctgctgcaagacatttggctactatgtgtagaatctacaacgactatggttccttggctagagatactgctgaaagaaatgttaactccatgcactacccagaattcagacaaactactgctcaagctgaagatccaactatggctaaaaagaaggctttgttgtcattgggtgaatacgaacacgatttcttgagagataccttggacagattggaaaaagctgttgctactccaccaccaggtggtatggttgaatctaaaagattaagagtcgtcaggttgttcagatacttctgtgatgttactgacttgtacgatcagttgtacgtcttgaaggatttgtcctcttcattgagaacctaa

SEQ ID NO: 106 - protein, 962 aa, Sphaceloma manihoticola
MLEGIGIGSSPQSLLDSAKDLIAEACSRTDPFYGLSTASCQTYDTAWVAMVVKRLESGEDAWAFPQSFRYILEAQTSGGGWGDPKASKTVGILDTAAALLALYRHLDRPLQITEVTRMDVESRIEKASTSLVSQLQQWDDLVESNHIGVELILPSLLEQLRQINPVLHSTRFKAEQDLTRMHEEKLRHFDVSSLYSSRPSSALHSLEAFLGKLDFDRVGHHLYHGSMMASPSSTAAYLIGASTYDSTAEAYLSHILKCTAKGSPGGIPGTFPITNFEYSWITATLLRDCFAYEDLAGPSLDCIGQTLEEALQAGKGVIGFAPRTADVDDTAKGLLALTSMRRYGHADPKPMIKVFEREDHFTTFGSERDPSFTSNCHVLLSLLAQESDLPLYRAQIYKATKFLCDFLFYRDGPLKDKWHMTSSYPSMLLVEAFSELLRLQDEQKFEQLLTSDEQHRVFIVLFQTCLRTLLVQSEDGSWSGCTEQTSHAVCTLARAWRLNLFIDLRPDLQVAIQAGIQYLDRPEAQMGQNWTSKTVYSVDLVGKAYILAARKMAQDLSDRTPFGPKREDFMSLKKFTTYLETSKRLPLLQATPPWQIIASLTESALFLPLLRKEKEAIFPRDGTMLTPDDYLDIIPYTWVICGNRIDVHTSPSLALDMMLLSMYGYQNDEFFETHAMAGHYQSGSDLKRLVDDVLQQNIPKCAEPSNGSSKHDTGNQSRTAQEAAISLPEMSAGLNRFISYILKHPLVAQAHPNSKSELHRELQAFLHAHSDQSDENRRFAAQEEKDELQSPSQTLFQYVRSTGGDHVACAYSLSFMLCIISSSLCDGGEVFQTAEEKYLAAAAARHLATMCRIYNDYGSLARDTAERNVNSMHYPEFRQTTAQAEDPTMAKKKALLSLGEYEHDFLRDTLDRLEKAVATPPPGGMVESKRLRVVRLFRYFCDVTDLYDQLYVLKDLSSSLRT

SEQ ID NO: 107 - DNA, 2901 bp, Fusarium proliferatum
atgtacgagaggtacttgttgttgttgcatatcttgactcacaagtccggtaagattgaaaatggtactccaaagtacttgaaaaccggtgatgatttggtttctgctgctaagtctttgttggatagagctttcaagtcccatcattcttactacggtttgtgttctacctcttgccaagtttatgatactgcttgggttgccatgattagaaagactactgaaaatgtcaagcactggttgttcccagaatgtttccattacttgttgaaaacccaagctgctgatggttcttggggtgctttgccaactactcaaactgctggtattttggatactgcttctgctgttttggctttgttgtctcatgttagaaagccattgcaaatcttggatgtttccccagacgaaattggtccaagaattgaacatggtgttgcctcattgaaaagacaattggctgtttggaaggacgtcgaagaaactaatcatatcggtgttgaattgatcgttccagccttgttgtctaccttggaaaaagaattgggtgagtcctcttttgaattcccatgtaagggtatcttggagaagatgtacgaagaaaagttgggtaacttcgacttgaagaaggtttacggtaaaccatcctctttgttgcattctttggaagctttcttgggtcaaatcgatttcgatagattgtcccatcacttgtacagaggttctatgatggcttctccatcttctactgctgcttatttgattggtgctactaagtgggatgatgaagctgaagattacttgagacacatcgttagaaatggtgctggtcatggtgatggtggtatttctggtacttttccaactacccatttcgaatgctcttggattttggctactttgttgcaaggtggtttcaccatgaagcaaattgattctaatggtttgagaggtttggctaccattttggctgatgctttgagagatgagaatggtgttattggttttgctccaagaactgccgatgttgatgatactgctaaagctttgttggccttgtccttgatcaatcaaccagtttctccagacatcatgatcaaggtttttgaaggtaaggatcacttcactaccttcggttctgaaagagatccatctttgacttccaacttgcatgttttgttgtgcttgttgaagcagccaaacgtttctcaataccatccacaaattctaaagaccaccttgttcacttgtagatggtggtggggttctgatcattgtgttaaggataagtggaacttgtctcacttgtacccaactatgttgttggttgaagctttcactgaagtcttgcatttgattgatgctggtgagttgtcatccttgttcgataagtctttgaagtgcaagatcggcttgtctattttccaagctgttttgagaatcatcttgacccaagataatgacggttcttggagagcttatagagaacaaacttgctacgctatcttggctttggttcaagctagacatgtttgtttcttcacccacatggttgatagattgcagtcttgtattgatagaggtgtctcttggttgaagtcctgtagatttcattcccaagatttgacttggacttctaagactgcttacgaagttggttttgttgctgaagcttacaaattggctgctttacaatctgcctctttggaagttccagctgctactattggtcattctgttacttcagctgttccatcttctgatttggagaagtacatgagattggttagaaagaccgctttgttctctccattggatgaatggggtttgagagcttctgttatcgaatcttctttcttcgtgccattattgcaagcccaaagagttgaaatctacccaagagataacatcaagatcgatgaggacaagtatttgagcattattccattcacttgggtcggttgtaacaacagatctagaacttttgcttccaacagatggttgtacgacatgatgtatttgtccttgttgggttaccaaaccgatgagtatatggaagctgttgctggtccagttttttccgatgtttctttgttgagattggccatcgataaggttattgataacaccagagttaacttggctggtacaaatggtactgttcataatggtaacggtcaccaacatgaatccccaaacattagacaagttgaagataccttgaccagattcgctaactctgttttgaaccacaaggatgtcttgaactcctcatcttctgatcaagacactttgagaagagaattcagagcttttatgcatgctcataccacccaaatcgaagataactctagattctctaagcaagcctctggtgatgttttttcatctccagaacaatcctacttccaatgggttaattctactggtggttctcatgttgcttgtgcttactcttttgctttctctaactgtttgatgtccgctaatttgccacaaggtaaagaagcttttccatctgctacacagaagtacttgatctcttctgttatgagacatgctaccaacatgtgcagaatgtacaatgatttcggttccattgccagagataacgttgaaagaaacgttaactctatgcacttcccagaattcgctttgtgtaagggtatttcccaaaccatcgatgacagaaagaagagattgtcccaaattgccatgtacgaacaaggttgtttggatagagcattggaagctttggaaagacaatctagagatgatgccggtgattctgctggttctaaagatgttagaaagatcaagatcgtcaagttgttctgtgaagttaccgacttgtatgatcagttgtacgttatcaaggacttgtcctcttcaatgaagtaa

SEQ ID NO: 108 - protein, 966 aa, Fusarium proliferatum
MYERYLLLLHILTHKSGKIENGTPKYLKTGDDLVSAAKSLLDRAFKSHHSYYGLCSTSCQVYDTAWVAMIRKTTENVKHWLFPECFHYLLKTQAADGSWGALPTTQTAGILDTASAVLALLSHVRKPLQILDVSPDEIGPRIEHGVASLKRQLAVWKDVEETNHIGVELIVPALLSTLEKELGESSFEFPCKGILEKMYEEKLGNFDLKKVYGKPSSLLHSLEAFLGQIDFDRLSHHLYRGSMMASPSSTAAYLIGATKWDDEAEDYLRHIVRNGAGHGDGGISGTFPTTHFECSWILATLLQGGFTMKQIDSNGLRGLATILADALRDENGVIGFAPRTADVDDTAKALLALSLINQPVSPDIMIKVFEGKDHFTTFGSERDPSLTSNLHVLLCLLKQPNVSQYHPQILKTTLFTCRWWWGSDHCVKDKWNLSHLYPTMLLVEAFTEVLHLIDAGELSSLFDKSLKCKIGLSIFQAVLRIILTQDNDGSWRAYREQTCYAILALVQARHVCFFTHMVDRLQSCIDRGVSWLKSCRFHSQDLTWTSKTAYEVGFVAEAYKLAALQSASLEVPAATIGHSVTSAVPSSDLEKYMRLVRKTALFSPLDEWGLRASVIESSFFVPLLQAQRVEIYPRDNIKIDEDKYLSIIPFTWVGCNNRSRTFASNRWLYDMMYLSLLGYQTDEYMEAVAGPVFSDVSLLRLAIDKVIDNTRVNLAGTNGTVHNGNGHQHESPNIRQVEDTLTRFANSVLNHKDVLNSSSSDQDTLRREFRAFMHAHTTQIEDNSRFSKQASGDVFSSPEQSYFQWVNSTGGSHVACAYSFAFSNCLMSANLPQGKEAFPSATQKYLISSVMRHATNMCRMYNDFGSIARDNVERNVNSMHFPEFALCKGISQTIDDRKKRLSQIAMYEQGCLDRALEALERQSRDDAGDSAGSKDVRKIKIVKLFCEVTDLYDQLYVIKDLSSSMK

SEQ ID NO: 109 - DNA, 1002 bp, Gibberella fujikuroi
atgaagactgtattgcaaccagataagcactcccacaagttgattttgtcatctcaacaaccagttccaactccatctcatccacaagatgttttggttaaggttcatgctacttgtccatgtaagggtgaattggattgggctttgtgggctccagaattcattggtgataagattccaattccaggtcaagatttggctggtactgttgtttctgctccagaaaattctggtttcaagccagatgatgaagtttacgctagaattgaagctaatagaccaggtgctgctgctgaatatgttttggctagagtttctgaattggccatcagaccaaagaatttgacttgggctgaaactgctgcttctccaatttctgctttgactgcttatcaaggtttgttcactagaggtggtttagatccaaaagctttggctggtgatgaagctgctagagaaaaaaatggtaaggtcagagttttgatcaacggttctgctggtggtgttggttcttgggctgttcaattggctagattggctggtgttaagactattgccggtgttgttggtactcaaaacatcgattttgtcagacaattgggtgctaccgaaaccattgattacaaaaagcaatccattggtgaatgggctactcaagatccatcttctagacaattcgatttggttttcgattgcatcggtttgccatctttgtctcaaacttggtatgctgttagagaaggtggtactttggtttctgtttgtgctccaccagaacaaaacagaccagaagatgttaagaaagaagtcaactccatcttcttcgttatcgatccagttggtaaggatttggaagttatcaccaagttgttggaagctggtcaaatcaagccacatatcgattctgttgttggtttggatgatttcgaagaagcttgggaaaaagtcgaatctggtagaactaagggtaaggttgttgttatggttatgaaggacgagtaa

SEQ ID NO: 110 - protein, 333 aa, Gibberella fujikuroi
MKTVLQPDKHSHKLILSSQQPVPTPSHPQDVLVKVHATCPCKGELDWALWAPEFIGDKIPIPGQDLAGTVVSAPENSGFKPDDEVYARIEANRPGAAAEYVLARVSELAIRPKNLTWAETAASPISALTAYQGLFTRGGLDPKALAGDEAAREKNGKVRVLINGSAGGVGSWAVQLARLAGVKTIAGVVGTQNIDFVRQLGATETIDYKKQSIGEWATQDPSSRQFDLVFDCIGLPSLSQTWYAVREGGTLVSVCAPPEQNRPEDVKKEVNSIFFVIDPVGKDLEVITKLLEAGQIKPHIDSVVGLDDFEEAWEKVESGRTKGKVVVMVMKDE

SEQ ID NO: 111 - DNA, 828 bp, Bradyrhizobium diazoefficiens
atgggtagattcgaaggtaaggttgctgttgttactggtgctggtgctggtattggtaaagcttgtgctttggctattgctagagaaggtggtagagttgttgttgctgatattgatggttctgctgctattgcttgtactgctcaaattgctgctgaagctggtcatgctttggctttagctattgatattgctgatgctcaagctgttgctgctttgtttgaaactgctgaaagacattttggtggtgttgatttgttggttaacaacgcttctgctatgcatttgactccaagagatagagccattttggaattggaattggctgtttgggatcaaactatggctagaaatttgaggggtactttgttgtgttgcagacaagctattccaagaatgattgctagaggtggtggtgctatagttaacatgtcatcttgtcaaggtttgtctggtgatactgctttgacttcttatgctgcttctaaggctgctatgaacatgttgtcatcttcattggctactcaatacggtcatgctcaaattagatgtaatgctgttgctccaggtttgatcatgactgaaagattgagaatgcaaacccatttgagaaggcaccaattattgccaagagttggtagaccaagaacttggccaagatggtggagatcttgttctccaactatgttgagatcttctactggtcaagttgtctgtattgatggtggtatgttggctcatgttccaacttatgctgatggtggtaattctagagctgctagaccagctggtgaaacagctgaagctgatgctgctccaagatgttaa

SEQ ID NO: 112 - protein, 275 aa, Bradyrhizobium diazoefficiens
MGRFEGKVAVVTGAGAGIGKACALAIAREGGRVVVADIDGSAAIACTAQIAAEAGHALALAIDIADAQAVAALFETAERHFGGVDLLVNNASAMHLTPRDRAILELELAVWDQTMARNLRGTLLCCRQAIPRMIARGGGAIVNMSSCQGLSGDTALTSYAASKAAMNMLSSSLATQYGHAQIRCNAVAPGLIMTERLRMQTHLRRHQLLPRVGRPRTWPRWWRSCSPTMLRSSTGQVVCIDGGMLAHVPTYADGGNSRAARPAGETAEADAAPRC

SEQ ID NO: 113 - DNA, 1449 bp, Gibberella fujikuroi
atgtccttcccagatgaacaaaaggttgatttccaaaccttccagaacgttatcaacaatcaattgtctccaacctccgaatccagacatggtatttgtccatctactgaagaatccttgtgggaatctccagtttctactcaagatgatgttgatagagctgtttctgctgctaaagctgcttatccagcttggagaaaattgtcttgggacgaaagagcttcttacttggttaagtttgctgatgctattgaagcccacaagcaagaattcattgatttgttgggtagagaagctggtaaaccaccacaagctggtggttttgaattgatgttggttatggaacacgttagggaaactccaaagttgagaattggtgaagttaagccagaagataacgaagatagaaccgctgttgttagatacgttccaattggtgttggtgttggtatagttccatggaattttccaatgttgttgggtattggtaaagcttacccagctatgttggctggtaatacttttatttggaagccatctccatacaccccatactctgctttgaaattggctgaaattggtgctaaagttttgccaccaggtgttttacaagctttgtctggtggtgatgatttgggtccaatgttgactgctcatccagatgttgctaaggtttcttttactggttctactgaaaccggtaaaaagattatggctgcttgtgctgctactttgaagagagttactttggaattgggtggtaatgatgctgctatcgtttgtgaagatgttgatattccaggtgttgctggtaaggttgcttttttggcttatgttcattctggtcagatctgcatgaacatcaagagaatctacgttcacgaatccatctacgacaagttcgtttccgaagttatcaagttcttgcatgctttgaaaaccggtgatttctctgatccagaagctttttttggtccaatccaaaacaagatgcagtacgaaaaattgcagaggttgtacgaacaaatcgataagcaaggttggaagtgtgcttttggttctgcttctccagctacttctgaaaaaggttattttgttccaccagtcttggttgataatccaccagaagattctgaaatcgtccaaatggaaccatttggtccaatagttccagttatgaagtggcaatctgaagatgatgttattgctagagctaacgcttctgattatggtttgggtgcttctgtttggtctaaagatgttgctagagcaagaagaatggctgaattattggaagctggttctgtttgggttaacacccattttgaagttgctccaaatgttccttttggtggtcataagcaatctggtattggtatggattggggtgaagttggtttgaaaggttggtgtaatccacaagcttattgggtcaaacattccggttaa

SEQ ID NO: 114 - protein, 482 aa, Gibberella fujikuroi
MSFPDEQKVDFQTFQNVINNQLSPTSESRHGICPSTEESLWESPVSTQDDVDRAVSAAKAAYPAWRKLSWDERASYLVKFADAIEAHKQEFIDLLGREAGKPPQAGGFELMLVMEHVRETPKLRIGEVKPEDNEDRTAVVRYVPIGVGVGIVPWNFPMLLGIGKAYPAMLAGNTFIWKPSPYTPYSALKLAEIGAKVLPPGVLQALSGGDDLGPMLTAHPDVAKVSFTGSTETGKKIMAACAATLKRVTLELGGNDAAIVCEDVDIPGVAGKVAFLAYVHSGQICMNIKRIYVHESIYDKFVSEVIKFLHALKTGDFSDPEAFFGPIQNKMQYEKLQRLYEQIDKQGWKCAFGSASPATSEKGYFVPPVLVDNPPEDSEIVQMEPFGPIVPVMKWQSEDDVIARANASDYGLGASVWSKDVARARRMAELLEAGSVWVNTHFEVAPNVPFGGHKQSGIGMDWGEVGLKGWCNPQAYWVKHSG

SEQ ID NO: 115 - DNA, 846 bp, Bradyrhizobium diazoefficiens
atgggtagattcgaaggtaaagttgctgtcgtcactggtgctggtgccggtattggtaaggcttgtgccttggctattgctagagaaggtggtcgtgttgtcgtcgccgacatcgatggttccgctgctatcgcttgtactgctcaaatcgctgctgaagctggtcatgctttggctttggctatcgatatcgctgatgctcaagccgtcgccgccttattcgaaaccgccgaaagacatttcggtggtgttgacttgttggttaataacgcttccgctatgcacttgactcctagagacagagctattttagaattggaattggctgtttgggatcaaaccatggctaccaacttgagaggtactttgttgtgctgtcgtcaagccatccctcgtatgattgctagaggtggtggtgctatcgttaacatgtcttcttgtcaaggtttatctggtgacaccgctttgacttcctacgctgcttctaaggccgccatgaacatgttgtcctcttctttggccacccaatatggtcacgcccaaatcagatgtaacgccgttgctccaggtttaatcatgactgaaagattgttggctaaattggatgcttgtatgcaaactcatttgagaagacaccaattgttgccaagagtcggtagacctgaagacgttgctgccttggttgcttttttgttatctgacgacgctgctttcatcactggtcaagttgtctgtatcgatggtggtatgttggctcacgttccaacctacgctgacggtggtaactctcgtgctgccagaccagctggtgaaactgctgaagccgatgctgctccaagatgctaa

SEQ ID NO: 116 - protein, 281 aa, Bradyrhizobium diazoefficiens
MGRFEGKVAVVTGAGAGIGKACALAIAREGGRVVVADIDGSAAIACTAQIAAEAGHALALAIDIADAQAVAALFETAERHFGGVDLLVNNASAMHLTPRDRAILELELAVWDQTMATNLRGTLLCCRQAIPRMIARGGGAIVNMSSCQGLSGDTALTSYAASKAAMNMLSSSLATQYGHAQIRCNAVAPGLIMTERLLAKLDACMQTHLRRHQLLPRVGRPEDVAALVAFLLSDDAAFITGQVVCIDGGMLAHVPTYADGGNSRAARPAGETAEADAAPRC

SEQ ID NO: 117 - DNA, 1125 bp, Mesorhizobium loti
atgagagttgttatcgatcaagatttgtgtggtactactggtcaatgtgtcttgactttgccaggtacttttagacaaagagaaccagacggtgtcgccgaagtctgtgttgctactgtcccacaagctttacacgctgctgctagattggctgcttcccaatgtcctgttgctgccattcgtgtcatcgagtctgacgctggtgaaagagcctctgctgatccagctccatccccagctcaagccgaaagacatgctgctaaggatcaaagaaatccaggtggtagattcgaaggtaaggttgctgttgtcaccggtgctggtgctggtattggtaaagcttgtgctttagccattgctagagaaggtggtagagttgttgtcgctgatatcgacggttctgctgccgtcgcctgtactgcccaaatcgccgccgaggctggtcatgctttggctttggccatggatattgctgatgcccaagccgttgctgctttgttcgaaactgctgaaagacactttggtggtgttgatttgttggtcaacaacgcttctgctatgcacttgaccccaagagatagaactattttggacttggacttggctgtctgggaccaaaccatggctactaatttgcgtggtaccttgttgtgttgtagacaagctatcccacgtatgatcgcccgtggtggtggtgctatcgtcaacatgtcttcttgtcaaggtttatctggtgacaccgctcaaacttcttacgctgcctctaaggctgctatgaacatgttgtccgcttctttggctacccaatacggtcacgctcaaattcgttgtaacgctgtcgctccaggtttgattatgactgaaagattattagctaagttagatgaatgtatgcaaagacacttatccagacaccaattgttgcaacgtgtcggtagaccagaagatgttgctgccttggtcgcttttttattatctgacgacgctgctttcattactggtcaagtcttgtgtattgatggtggtatgttggctcacgttccaacctacgctgacggtggtaactctagagctgctagaccagccggtgatactgccaaggccgctgctggtccaagatgttaa

SEQ ID NO: 118 - protein, 374 aa, Mesorhizobium loti
MRVVIDQDLCGTTGQCVLTLPGTFRQREPDGVAEVCVATVPQALHAAARLAASQCPVAAIRVIESDAGERASADPAPSPAQAERHAAKDQRNPGGRFEGKVAVVTGAGAGIGKACALAIAREGGRVVVADIDGSAAVACTAQIAAEAGHALALAMDIADAQAVAALFETAERHFGGVDLLVNNASAMHLTPRDRTILDLDLAVWDQTMATNLRGTLLCCRQAIPRMIARGGGAIVNMSSCQGLSGDTAQTSYAASKAAMNMLSASLATQYGHAQIRCNAVAPGLIMTERLLAKLDECMQRHLSRHQLLQRVGRPEDVAALVAFLLSDDAAFITGQVLCIDGGMLAHVPTYADGGNSRAARPAGDTAKAAAGPRC

SEQ ID NO: 119 - DNA, 1446 bp, Bradyrhizobium diazoefficiens
atggacgctgtcactggtttgttgactgtcccagctactgctatcaccatcggtggtaccgctgttgctttggctgtcgccttgatcttttggtacttaaaatccgatatgttgttgaatccattgaacagaagacatagattgagacatgacatcccagttgttccaggtgccttcccattggttggtcacttgcctgctgttgtttgcgatttgcctagattattgagaagagctgaacgtaccttgggttctcacttctggttagatttcggtccagctggtcatttgatgacttctttggacccagatgctttggctttgttgagacacaaggacgtctcttccggtttaattgaagatattgctccagaattattcggtggtactttggtcgctcaagacggtattgctcacagacaagccagagacgctattcaagctgccttgttgcctaagggtttaactttggctggtatcggtgaattgttcgccccagttattagagccagagtccaaagatggagagaaagaggtgatgtcactatcttgagagaaaccggtgatttgatgttaaagttgattttctccttgatgggtatccctgctcaagatttgcctggttggcacagaaagtaccgtcaattattgcaattgatcgtcgctccacctgtcgacttgccaggtttgccattgagaagaggtagagccgctagagactggatcgacgccagattgagagaatttgtcagagctgctcgtgagcacgcctctcgtaccggtttaatcaatgatatggtttctgctttcgacagatccgacgacgccttgtctgacgatgttttggtcgctaacatcagattgttgttgttaggtggtcacgacaccaccgcttccactatggcttggatggttattgaattggctcgtcaaccaggtttgtgggatgctttagttgaagaagctcaaagagttggtgctgttccaactcgtcatgctgacttggctcaatgtccagttgccgaagccttattcagagaaactttaagagttcacccagccactccattattggtcagaagagctttgagagaattgagaatcggtcaacaacgtatcccaaccggtactgacttgtgtattccattgttgcacttctccacctccgctttgttgcatgaagctccagatcaatttagattggctagatggttacaaagaaccgaaccaatcagaccagttgatatgttacaattcggtactggtccacacttttgtatgggttaccacttagtttggttggaattggttcaattctgtattgctttggctttgaccatgcacgaagctggtgttagacctagattgttatccggtgttgaaaagggtagaagatattacccaaccgcccatccatccatgaccattagaattggtttttcttaa

SEQ ID NO: 120 - protein, 481 aa, Bradyrhizobium diazoefficiens
MDAVTGLLTVPATAITIGGTAVALAVALIFWYLKSDMLLNPLNRRHRLRHDIPVVPGAFPLVGHLPAVVCDLPRLLRRAERTLGSHFWLDFGPAGHLMTSLDPDALALLRHKDVSSGLIEDIAPELFGGTLVAQDGIAHRQARDAIQAALLPKGLTLAGIGELFAPVIRARVQRWRERGDVTILRETGDLMLKLIFSLMGIPAQDLPGWHRKYRQLLQLIVAPPVDLPGLPLRRGRAARDWIDARLREFVRAAREHASRTGLINDMVSAFDRSDDALSDDVLVANIRLLLLGGHDTTASTMAWMVIELARQPGLWDALVEEAQRVGAVPTRHADLAQCPVAEALFRETLRVHPATPLLVRRALRELRIGQQRIPTGTDLCIPLLHFSTSALLHEAPDQFRLARWLQRTEPIRPVDMLQFGTGPHFCMGYHLVWLELVQFCIALALTMHEAGVRPRLLSGVEKGRRYYPTAHPSMTIRIGFS

SEQ ID NO: 121 - DNA, 1338 bp, Bradyrhizobium diazoefficiens
atgttgttgaatccattgaacagaagacatagattgagacatgacatcccagttgttccaggtgccttcccattggttggtcacttgcctgctgttgtttgcgatttgcctagattattgagaagagctgaacgtaccttgggttctcacttctggttagatttcggtccagctggtcatttgatgacttctttggacccagatgctttggctttgttgagacacaaggacgtctcttccggtttaattgaagatattgctccagaattattcggtggtactttggtcgctcaagacggtattgctcacagacaagccagagacgctattcaagctgccttgttgcctaagggtttaactttggctggtatcggtgaattgttcgccccagttattagagccagagtccaaagatggagagaaagaggtgatgtcactatcttgagagaaaccggtgatttgatgttaaagttgattttctccttgatgggtatccctgctcaagatttgcctggttggcacagaaagtaccgtcaattattgcaattgatcgtcgctccacctgtcgacttgccaggtttgccattgagaagaggtagagccgctagagactggatcgacgccagattgagagaatttgtcagagctgctcgtgagcacgcctctcgtaccggtttaatcaatgatatggtttctgctttcgacagatccgacgacgccttgtctgacgatgttttggtcgctaacatcagattgttgttgttaggtggtcacgacaccaccgcttccactatggcttggatggttattgaattggctcgtcaaccaggtttgtgggatgctttagttgaagaagctcaaagagttggtgctgttccaactcgtcatgctgacttggctcaatgtccagttgccgaagccttattcagagaaactttaagagttcacccagccactccattattggtcagaagagctttgagagaattgagaatcggtcaacaacgtatcccaaccggtactgacttgtgtattccattgttgcacttctccacctccgctttgttgcatgaagctccagatcaatttagattggctagatggttacaaagaaccgaaccaatcagaccagttgatatgttacaattcggtactggtccacacttttgtatgggttaccacttagtttggttggaattggttcaattctgtattgctttggctttgaccatgcacgaagctggtgttagacctagattgttatccggtgttgaaaagggtagaagatattacccaaccgcccatccatccatgaccattagaattggtttttcttaa

SEQ ID NO: 122 - protein, 445 aa, Bradyrhizobium diazoefficiens
MLLNPLNRRHRLRHDIPVVPGAFPLVGHLPAVVCDLPRLLRRAERTLGSHFWLDFGPAGHLMTSLDPDALALLRHKDVSSGLIEDIAPELFGGTLVAQDGIAHRQARDAIQAALLPKGLTLAGIGELFAPVIRARVQRWRERGDVTILRETGDLMLKLIFSLMGIPAQDLPGWHRKYRQLLQLIVAPPVDLPGLPLRRGRAARDWIDARLREFVRAAREHASRTGLINDMVSAFDRSDDALSDDVLVANIRLLLLGGHDTTASTMAWMVIELARQPGLWDALVEEAQRVGAVPTRHADLAQCPVAEALFRETLRVHPATPLLVRRALRELRIGQQRIPTGTDLCIPLLHFSTSALLHEAPDQFRLARWLQRTEPIRPVDMLQFGTGPHFCMGYHLVWLELVQFCIALALTMHEAGVRPRLLSGVEKGRRYYPTAHPSMTIRIGFS

SEQ ID NO: 123 - DNA, 1308 bp, Bradyrhizobium diazoefficiens
atggatgctgtcaccggtttgttaaccgttccagctaccgctattaccatcggtggtaccgctgtcgccttagctgttgctttgattttctggtacttaaagtcttctgaacaacaacctttgccaaccttgccaatgtggagagttgaccacattgaaccttctccagaaatgttggctttgagagctaatggtcctatccatcgtgttcgtttcccatctggtcacgaaggttggtgggtcaccggttatgacgaagctaaggctgttttgtccgatgccgccttccgtcctgctggtatgcctccagctgctttcactccagactctgtcattttgggttctccaggttggttagtctctcacgaaggtagagaacatgctagattgcgtgctattgttgctccagctttctctgatagaagagttaaattgttggtccaacaagtcgaagccattgctgcccacttgttcgagactttagctgcccaacctcaacctgccgatttgagaagacacttgtctttccctttaccagccatggttatttctgccttaatgggtgtcttatacgaggaccacgctttctttgctggtttgtctgacgaagttatgactcaccaacatgaatccggtccacgttctgcttctagattggcctgggaggaattgagagcctacattagaggtaagatgagagacaagagacaagacccagacgataacttgttaactgatttgttggctgctgtcgatcaaggtaaggcttccgaagaagaagctgttggtttggccgctggtatgttggttgctggtcatgaatctactgttgcccaaatcgaatttggtttgttggccatgttcagacacccacaacaaagagaaagattagttggtgatccatctttggttgacaaggctgttgaggaaattttgagaatgtatccaccaggtgctggttgggatggtatcatgcgttacccaagaactgatgttactatcgctggtgaacacattccagccgaatccaaggttttggtcggtttgccagctacctccttcgatccacaccactttgacgatccagaaatcttcgacatcgaaagacaagaaaaaccacacttagccttttcctacggtcctcacgcttgtatcggtgttgctttggctagattggagttgaaggttgtcttcggttctattttccaaagattgcctgctttacgtttagccgttgctccagaacaattgaagttgagaaaggaaatcatcaccggtggttttgaacaattcccagttttgtggtaa

SEQ ID NO: 124 - protein, 435 aa, Bradyrhizobium diazoefficiens
MDAVTGLLTVPATAITIGGTAVALAVALIFWYLKSSEQQPLPTLPMWRVDHIEPSPEMLALRANGPIHRVRFPSGHEGWWVTGYDEAKAVLSDAAFRPAGMPPAAFTPDSVILGSPGWLVSHEGREHARLRAIVAPAFSDRRVKLLVQQVEAIAAHLFETLAAQPQPADLRRHLSFPLPAMVISALMGVLYEDHAFFAGLSDEVMTHQHESGPRSASRLAWEELRAYIRGKMRDKRQDPDDNLLTDLLAAVDQGKASEEEAVGLAAGMLVAGHESTVAQIEFGLLAMFRHPQQRERLVGDPSLVDKAVEEILRMYPPGAGWDGIMRYPRTDVTIAGEHIPAESKVLVGLPATSFDPHHFDDPEIFDIERQEKPHLAFSYGPHACIGVALARLELKVVFGSIFQRLPALRLAVAPEQLKLRKEIITGGFEQFPVLW

SEQ ID NO: 125 - DNA, 1392 bp, Bradyrhizobium diazoefficiens
atggacgctgttaccggtttgttgactgttccagctactgctatcaccattggtggtactgctgttgctttggctgtcgctttaatcttctggtatttaaagtccgacgttcaagaaaccactgctgcttgcagagacgctttcgctgaattagcttccccagcttgtattcacgatccttacccattcatgagatggttgcgtgaacacgacccagttcacagagctgcctctggtttgttcttgttgtccagacatgctgatatcttttgggctttcaaggccaccggtgatgctttcagaggtccagctccaggtgagttggctagatacttttctagagctgccacctctccatccttgaacttgttggcctctactttggctatgaaggatccacctacccacaccagattgagaagattgatttctagagacttcactatgggtcaaatcgacaacttgagaccatccattgccagaatcgttgccgctagattagatggtattactccagccttggaaagaggtgaagctgtcgacttgcacagagaatttgctttggccttacctatgttggttttcgctgaattgtttggtatgcctcaagatgatatgtttgagttagctgccggtatcggtactattttggaaggtttgggtccacatgcttctgatccacaattggctgctgccgacgctgcttctgctagagtccaagcttacttcggtgatttgatccaaagaaaacgtaccgatcctagaagagacatcgtctccatgttggttggtgctcacgatgacgatgccgatactttgtctgacgctgaattaatttctatgttgtggggtatgttgttaggtggtttcgttaccactgctgcctccatcgatcatgctgttttggctatgttggcttatccagaacaaagacattggttacaagctgacgctgctagagttagagcttttgttgaagaagttttaagatgtgacgctccagctatgttttcctccattccaagaattgctcaaagagatatcgaattgggtggtgtcgtcattcctaagaacgctgacgttagagtcttaatcgcctccggtaacagagatccagacgcttttgctgatccagatagattcgatccagctagattctatggtacctccccaggtatgtctactgacggtaaaattatgttatctttcggtcatggtatccacttctgcttaggtgcccaattggccagagtccaattggctgaatctttgcctagaattcaagctagatttccaactttggcttttgctggtcaaccaaccagagaaccatccgctttcttaagaactttccgtactttgccagtcagattgcatgcccaaggttcctaa

SEQ ID NO: 126 - protein, 463 aa, Bradyrhizobium diazoefficiens
MDAVTGLLTVPATAITIGGTAVALAVALIFWYLKSDVQETTAACRDAFAELASPACIHDPYPFMRWLREHDPVHRAASGLFLLSRHADIFWAFKATGDAFRGPAPGELARYFSRAATSPSLNLLASTLAMKDPPTHTRLRRLISRDFTMGQIDNLRPSIARIVAARLDGITPALERGEAVDLHREFALALPMLVFAELFGMPQDDMFELAAGIGTILEGLGPHASDPQLAAADAASARVQAYFGDLIQRKRTDPRRDIVSMLVGAHDDDADTLSDAELISMLWGMLLGGFVTTAASIDHAVLAMLAYPEQRHWLQADAARVRAFVEEVLRCDAPAMFSSIPRIAQRDIELGGVVIPKNADVRVLIASGNRDPDAFADPDRFDPARFYGTSPGMSTDGKIMLSFGHGIHFCLGAQLARVQLAESLPRIQARFPTLAFAGQPTREPSAFLRTFRTLPVRLHAQGS

SEQ ID NO: 127 - DNA, 1206 bp, Bradyrhizobium diazoefficiens
atgtctgaacaacaacctttgccaaccttgccaatgtggagagttgaccacattgaaccttctccagaaatgttggctttgagagctaatggtcctatccatcgtgttcgtttcccatctggtcacgaaggttggtgggtcaccggttatgacgaagctaaggctgttttgtccgatgccgccttccgtcctgctggtatgcctccagctgctttcactccagactctgtcattttgggttctccaggttggttagtctctcacgaaggtagagaacatgctagattgcgtgctattgttgctccagctttctctgatagaagagttaaattgttggtccaacaagtcgaagccattgctgcccacttgttcgagactttagctgcccaacctcaacctgccgatttgagaagacacttgtctttccctttaccagccatggttatttctgccttaatgggtgtcttatacgaggaccacgctttctttgctggtttgtctgacgaagttatgactcaccaacatgaatccggtccacgttctgcttctagattggcctgggaggaattgagagcctacattagaggtaagatgagagacaagagacaagacccagacgataacttgttaactgatttgttggctgctgtcgatcaaggtaaggcttccgaagaagaagctgttggtttggccgctggtatgttggttgctggtcatgaatctactgttgcccaaatcgaatttggtttgttggccatgttcagacacccacaacaaagagaaagattagttggtgatccatctttggttgacaaggctgttgaggaaattttgagaatgtatccaccaggtgctggttgggatggtatcatgcgttacccaagaactgatgttactatcgctggtgaacacattccagccgaatccaaggttttggtcggtttgccagctacctccttcgatccacaccactttgacgatccagaaatcttcgacatcgaaagacaagaaaaaccacacttagccttttcctacggtcctcacgcttgtatcggtgttgctttggctagattggagttgaaggttgtcttcggttctattttccaaagattgcctgctttacgtttagccgttgctccagaacaattgaagttgagaaaggaaatcatcaccggtggttttgaacaattcccagttttgtggtaa

SEQ ID NO: 128 - protein, 401 aa, Bradyrhizobium diazoefficiens
MSEQQPLPTLPMWRVDHIEPSPEMLALRANGPIHRVRFPSGHEGWWVTGYDEAKAVLSDAAFRPAGMPPAAFTPDSVILGSPGWLVSHEGREHARLRAIVAPAFSDRRVKLLVQQVEAIAAHLFETLAAQPQPADLRRHLSFPLPAMVISALMGVLYEDHAFFAGLSDEVMTHQHESGPRSASRLAWEELRAYIRGKMRDKRQDPDDNLLTDLLAAVDQGKASEEEAVGLAAGMLVAGHESTVAQIEFGLLAMFRHPQQRERLVGDPSLVDKAVEEILRMYPPGAGWDGIMRYPRTDVTIAGEHIPAESKVLVGLPATSFDPHHFDDPEIFDIERQEKPHLAFSYGPHACIGVALARLELKVVFGSIFQRLPALRLAVAPEQLKLRKEIITGGFEQFPVLW

SEQ ID NO: 129 - DNA, 1149 bp, Bradyrhizobium diazoefficiens
atgttgtccagacatgctgatatcttttgggctttcaaggccaccggtgatgctttcagaggtccagctccaggtgagttggctagatacttttctagagctgccacctctccatccttgaacttgttggcctctactttggctatgaaggatccacctacccacaccagattgagaagattgatttctagagacttcactatgggtcaaatcgacaacttgagaccatccattgccagaatcgttgccgctagattagatggtattactccagccttggaaagaggtgaagctgtcgacttgcacagagaatttgctttggccttacctatgttggttttcgctgaattgtttggtatgcctcaagatgatatgtttgagttagctgccggtatcggtactattttggaaggtttgggtccacatgcttctgatccacaattggctgctgccgacgctgcttctgctagagtccaagcttacttcggtgatttgatccaaagaaaacgtaccgatcctagaagagacatcgtctccatgttggttggtgctcacgatgacgatgccgatactttgtctgacgctgaattaatttctatgttgtggggtatgttgttaggtggtttcgttaccactgctgcctccatcgatcatgctgttttggctatgttggcttatccagaacaaagacattggttacaagctgacgctgctagagttagagcttttgttgaagaagttttaagatgtgacgctccagctatgttttcctccattccaagaattgctcaaagagatatcgaattgggtggtgtcgtcattcctaagaacgctgacgttagagtcttaatcgcctccggtaacagagatccagacgcttttgctgatccagatagattcgatccagctagattctatggtacctccccaggtatgtctactgacggtaaaattatgttatctttcggtcatggtatccacttctgcttaggtgcccaattggccagagtccaattggctgaatctttgcctagaattcaagctagatttccaactttggcttttgctggtcaaccaaccagagaaccatccgctttcttaagaactttccgtactttgccagtcagattgcatgcccaaggttcctaa

SEQ ID NO: 130 - protein, 382 aa, Bradyrhizobium diazoefficiens
MLSRHADIFWAFKATGDAFRGPAPGELARYFSRAATSPSLNLLASTLAMKDPPTHTRLRRLISRDFTMGQIDNLRPSIARIVAARLDGITPALERGEAVDLHREFALALPMLVFAELFGMPQDDMFELAAGIGTILEGLGPHASDPQLAAADAASARVQAYFGDLIQRKRTDPRRDIVSMLVGAHDDDADTLSDAELISMLWGMLLGGFVTTAASIDHAVLAMLAYPEQRHWLQADAARVRAFVEEVLRCDAPAMFSSIPRIAQRDIELGGVVIPKNADVRVLIASGNRDPDAFADPDRFDPARFYGTSPGMSTDGKIMLSFGHGIHFCLGAQLARVQLAESLPRIQARFPTLAFAGQPTREPSAFLRTFRTLPVRLHAQGS

SEQ ID NO: 131 - DNA, 903 bp, Bradyrhizobium diazoefficiens
atgatccaaaccgaaagagccgttcaacaagttttggaatggggtagatctttgactggttttgctgatgaacatgctgttgaagctgttagaggtggtcagtacatcttgcaaagaattcatccatctttgagaggtacatctgctagaactggtagagatccacaagacgaaactttgatcgttaccttctatagagaattggccttgttgttttggttggatgattgcaatgatttgggcttgatttccccagaacaattggctgctgttgaacaagctttgggtcaaggtgttccatgtgctttgccaggttttgaaggttgtgctgttttgagagcttctttggctactttggcttacgatagaagagattatgctcagttgttggatgataccagatgttattctgctgctttaagagctggtcatgctcaagctgttgctgctgaaagatggtcttatgctgaatacttgcataacggtattgactccattgcttacgctaacgttttctgttgtttgtctttgttgtggggtttggatatggctactttgagagctagaccagcttttagacaagtcttgagattgatttccgccatcggtagattgcaaaatgacttgcatggttgcgataaggatagatctgctggtgaagctgataacgctgttattttgttgttgcaaagatacccagctatgccagttgttgaattcttgaatgatgaattggctggtcacaccagaatgttgcatagagttatggctgaagaaagatttccagctccatggggtccattgattgaagctatggctgctattagagttcagtactacagaacttctacctccagatatagatccgatgctgtaagaggtggacaaagagcaccagcttaa

SEQ ID NO: 132 - protein, 300 aa, Bradyrhizobium diazoefficiens
MIQTERAVQQVLEWGRSLTGFADEHAVEAVRGGQYILQRIHPSLRGTSARTGRDPQDETLIVTFYRELALLFWLDDCNDLGLISPEQLAAVEQALGQGVPCALPGFEGCAVLRASLATLAYDRRDYAQLLDDTRCYSAALRAGHAQAVAAERWSYAEYLHNGIDSIAYANVFCCLSLLWGLDMATLRARPAFRQVLRLISAIGRLQNDLHGCDKDRSAGEADNAVILLLQRYPAMPVVEFLNDELAGHTRMLHRVMAEERFPAPWGPLIEAMAAIRVQYYRTSTSRYRSDAVRGGQRAPA

SEQ ID NO: 133 - DNA, 924 bp, Sphaceloma manihoticola
atggctggtgattctcatgaaccatttgctactatagtcgagtctcctttgtcttacgtttcttccttgccatccaaacatttcagagttcaattattggaggccttgaacatctggtatgaattgccacaaaacgaggtttccaagatcggtgatatcttgcagttgttgcataactcctcattgatcttggatgacttccaagatagatccccattgagaagaggtagaccagctgctcatgctttgtttggtgaagctcaagctattaactcttcctcttacggtttcattaaggctgttgctttggctcaagaatccttcgatttggaatctactaaggctgttactaccgctatgttgagatcttttgaaggtcaagctgctgaattgcattggactcatacaaaaacttgcccatccgttcaagaatacttggaaatggttaacttctcctccttgttgcatttggctccacaattgatgcaagctaaaagaggttctgctactccagttgatcaaaggtctatggtttccttgatgagattgctaggtcaattctaccaaatcagggacgactatatgaacttgacttctgctcattacgaaaaggataagggtttctgcgaagatttggacgaaggtaaatattccttgccattgattcatgctttggccgttaagccaagatctgttttgttggcttctgctttggctgcttctggtgctccaggtggtttatctagacaacaaaaagtctgcatcttggaagaattggaaaaggctagatctttggcttggacaaaagctactttgtgcgaattgcaagttgccatgtctgaagaaattgcccaattggaagatagattcggtagaccaaacgagttgttgcaaaccttgatttctaaggttgccattaagtaa

SEQ ID NO: 134 - protein, 307 aa, Sphaceloma manihoticola
MAGDSHEPFATIVESPLSYVSSLPSKHFRVQLLEALNIWYELPQNEVSKIGDILQLLHNSSLILDDFQDRSPLRRGRPAAHALFGEAQAINSSSYGFIKAVALAQESFDLESTKAVTTAMLRSFEGQAAELHWTHTKTCPSVQEYLEMVNFSSLLHLAPQLMQAKRGSATPVDQRSMVSLMRLLGQFYQIRDDYMNLTSAHYEKDKGFCEDLDEGKYSLPLIHALAVKPRSVLLASALAASGAPGGLSRQQKVCILEELEKARSLAWTKATLCELQVAMSEEIAQLEDRFGRPNELLQTLISKVAIK

SEQ ID NO: 135 - DNA, 561 bp, Bos taurus
atggctgctagattgttaagagttgcctctgctgcactaggtgatactgccggaagatggagactattagtaagaccaagagctggcgccggtggattaaggggctcaagaggtcctggtctaggaggcggtgccgtcgctacaagaaccctttccgtgagtggaagggcacaaagctcttcagaggacaaaattactgttcactttatcaatagagatggtgagacattgaccactaagggcaaaatcggtgactccttattggatgtagtcgtgcagaacaacttagacattgatggattcggtgcttgtgaaggcacactagcctgcagtacctgtcaccttatatttgagcaacatatcttcgaaaagttggaagcaattactgatgaggaaaacgacatgttagatctagcttatggtttgacagacaggagcagattaggatgccagatatgtcttaccaaagccatggataatatgactgttagagtaccagatgcagtctctgacgctagggaatcaatcgatatgggtatgaactccagtaagattgagtaa

SEQ ID NO: 136 - protein, 186 aa, Bos taurus
MAARLLRVASAALGDTAGRWRLLVRPRAGAGGLRGSRGPGLGGGAVATRTLSVSGRAQSSSEDKITVHFINRDGETLTTKGKIGDSLLDVVVQNNLDIDGFGACEGTLACSTCHLIFEQHIFEKLEAITDEENDMLDLAYGLTDRSRLGCQICLTKAMDNMTVRVPDAVSDARESIDMGMNSSKIE

SEQ ID NO: 137 - DNA, 1206 bp, Bos taurus
atgcttttgaacacctttacccaaactgccagaagtgacaggtgtgctttctatggaaatgtcgaagtgggcagagatgttacagtacaagaattaagggtctacaggttgaccgcagttgttctaagctatggtgccgaagatcaccaggcacttgatattccaggtgaagagttgccaggagttttttctgcaagagctttcgtaggctggtacaacggtttgccagaaaatagagaattagcccctgacctatcatgcgatactgcagtcatattgggacaaggtaacgtggctttggacgttgccaggatacttttgaccccacctgaccacttagagaaaactgatattaccgaagcagctctaggcgcccttagacagtccagagtaaagacagtctggatagttggtaggagaggaccattgcaagtggcctttactatcaaagagcttagagagatgattcaacttcctggcaccaggcctatgttggacccagctgatttcttaggccttcaggatagaattagggaagccgcaagacctagaaagaggttgatggagttactattgagaacagctactgaaaaaccaggtgttgaagaggccgcaagaagggctagtgctagcagagcttggggattaaggtttttcagaagccctcaacaagtacttaggcttccagacggtagggcaagaagatcagcttggcagtcccctgaattggaaggcataggagaggcccatccaggtagcgcacactggggctgtggtggacctccatgcggtttagtactttcttcaatcggctataagtctaggcctattgatccaagcgtgccttttgacccaaaattgggtgttgtaccaaatatggaaggaagagtcgttgatgtgcctggtttatactgttccggctgggttaagagaggaccaacaggtgtaataaccactacaatgactgatagttttctaaccggtcaaattttgctacaggaccttaaagctggccatttgccttccggtccaaggcctggctcagccttcattaaggcactattagattctaggggtgtctggccagtttcctttagtgactgggaaaaattggatgctgaggaagtgagcagaggccaagcatctggaaagcctagagaaaaacttctagatcctcaagagatgctaagattgttaggtcactga

SEQ ID NO: 138 - protein, 401 aa, Bos taurus
MLLNTFTQTARSDRCAFYGNVEVGRDVTVQELRVYRLTAVVLSYGAEDHQALDIPGEELPGVFSARAFVGWYNGLPENRELAPDLSCDTAVILGQGNVALDVARILLTPPDHLEKTDITEAALGALRQSRVKTVWIVGRRGPLQVAFTIKELREMIQLPGTRPMLDPADFLGLQDRIREAARPRKRLMELLLRTATEKPGVEEAARRASASRAWGLRFFRSPQQVLRLPDGRARRSAWQSPELEGIGEAHPGSAHWGCGGPPCGLVLSSIGYKSRPIDPSVPFDPKLGVVPNMEGRVVDVPGLYCSGWVKRGPTGVITTTMTDSFLTGQILLQDLKAGHLPSGPRPGSAFIKALLDSRGVWPVSFSDWEKLDAEEVSRGQASGKPREKLLDPQEMLRLLGH

SEQ ID NO: 139 - DNA, 2064 bp, Candida apicola
atggtggacacaaacttattggcttctgttgccgtcgctctagtcgtcgttttcgttgcttacaagtactttaatggtgggctggaagtccaatcatctaatgctggatctagtacaccttttggtaatgcaaaggctgacgaagacggagattccaggaacttcgtggctttgatggaaaaaaataataagaacgttattgttttctatggttcccaaacaggaacggccgaggatttggctagcaaattggccaaggagttaagctcaaagtatggtctaaggacaatgaccgccgatcccgaaaattttgatttcgacaaatttgatacctttccagagagtcatctggctgtttttatcacagccagttacggagatggcgaacctacagacaatgcacaggatttatattccttcttaggtaattcaccaagtttctcacaggatggtgaaacccttgagaaccttaattttgcagtgttcggtttaggtaatgtactatatgaattctacaacaaggccggcagagatatgcacaagtttctaactgatttaggcggtcactcaataggtccatacggggaaggtgatgactcaaaagggatgttagaggaagattacatggcatggaaagatgaatttctagctgccctagttacgaaatggggtttgaaggaaagagaagctgtctacgagccagccattagtgtgaaggatattgaagaggatgctcaatcacatgacgtttacttgggtgaaccaaacctaaagcacttacaagctagcaaggcccgtgaagtccccaaagggccgtataatgctagcaatccaatgttagccaaggttacagcagctcaggagttgtttactaacactgatcgtcattgtattcatatggagtttgatactaccggcgcgaggtataccacgggcgatcacctggctttctggtgtcaaaataacgaagaggaagttcagagattcgctaaggcattaggtataaccaacccgcagcaaccaattgcaatatcagtgcttgacaagacttcaacagtaagaattcccagtccaactacctatgagaccattataagacattttttagagatcaacggcccagtgagccgtcaagttcttagtagcattgcaccgttcgccccgagcgaggaagtcaagaaagctacgcaacagctaggctctaacaaggaactgtttgctagtcatgttgccgcaaaaaagtttaacatagcaagattgttgttgcatttatcaggcggccaaccttggaaaaacgtccccttttcattcatcattgaaaccattccccatctacaacccaggtactactctatttcctcatcatcagtccaaagccctaatactatctctattactgctgtcgtggaaagacaaaagttagccggtgtagatcatgaattgagaggtgtagccacgaatcaaattttggccttgtccgaagcattgataggtagaccttcaagcacatacagactacagcagccccatgattttacaggttcattaaattcacaagatattagagtaccagtacatattagacatagcttatttaagctacctgccaaacccacagttccaataataatggtcggaccaggtaccggcgtcgcgccattcagaggttttgtgcatgaaagggcagctcaaaaggctgccggtaaggaagttggaaaagctctattgttcaccggatcaagacatgcaaatgaggattttctatacagagacgaatggaaacaatttagtgattttttggatttggaaacagctttttctagagattccaatactaaggtttatgtgcaacacaagctgaaagaaagagccaaggacgtgtttgctttgcttaatgaaggcgcggttttctatgtctgcggtgacgcgggtggaatgtcacatgatgtgcatagcgccttgttggaaattgtagctcaagagggtaacttgtctagcgaagatgcagataaatttgtcaggaaaatgagatcaagaaataagtaccaagaggatgtatggtaa

SEQ ID NO: 140 - protein, 687 aa, Candida apicola
MVDTNLLASVAVALVVVFVAYKYFNGGLEVQSSNAGSSTPFGNAKADEDGDSRNFVALMEKNNKNVIVFYGSQTGTAEDLASKLAKELSSKYGLRTMTADPENFDFDKFDTFPESHLAVFITASYGDGEPTDNAQDLYSFLGNSPSFSQDGETLENLNFAVFGLGNVLYEFYNKAGRDMHKFLTDLGGHSIGPYGEGDDSKGMLEEDYMAWKDEFLAALVTKWGLKEREAVYEPAISVKDIEEDAQSHDVYLGEPNLKHLQASKAREVPKGPYNASNPMLAKVTAAQELFTNTDRHCIHMEFDTTGARYTTGDHLAFWCQNNEEEVQRFAKALGITNPQQPIAISVLDKTSTVRIPSPTTYETIIRHFLEINGPVSRQVLSSIAPFAPSEEVKKATQQLGSNKELFASHVAAKKFNIARLLLHLSGGQPWKNVPFSFIIETIPHLQPRYYSISSSSVQSPNTISITAVVERQKLAGVDHELRGVATNQILALSEALIGRPSSTYRLQQPHDFTGSLNSQDIRVPVHIRHSLFKLPAKPTVPIIMVGPGTGVAPFRGFVHERAAQKAAGKEVGKALLFTGSRHANEDFLYRDEWKQFSDFLDLETAFSRDSNTKVYVQHKLKERAKDVFALLNEGAVFYVCGDAGGMSHDVHSALLEIVAQEGNLSSEDADKFVRKMRSRNKYQEDVW

SEQ ID NO: 141 - DNA, 1575 bp, Gibberella fujikuroi
atgtccatattcaacatgatcacttcttacgctggcagtcaattactgccattctatattgctatttttgtttttactctggttccttgggctatcaggttttcttggcttgaattgaggaaggggtctgtagtccccttagcaaatccacccgatagtctttttggaacaggtaagacacgtagatcctttgtaaaattatctagggaaatattagctaaggctagatcattgtttccgaacgaaccctttagattaatcactgactggggcgaggtattaatattacctcctgattttgctgacgaaatacgtaatgatccgaggctatcattcagtaaagctgctatgcaagataatcacgccggtattccagggtttgagacagtcgctttggtgggacgtgaagaccaattaatacaaaaagtcgccagaaagcaattgactaagcatcttagcgcagtaattgaacctctgagtagggaaagtaccctagctgtatctctaaattttggagaaacgacagaatggagagccattaggcttaagccagcaattcttgatattattgctaggatctcctcacgtatctatctaggagatcaactatgcaggaatgaggcatggctaaagattactaagacttacacaacaaacttttacactgcctctaccaatcttagaatgttccccagaagtataagacctttagctcactggttcttgccagaatgtagaaagcttcgtcaagagaggaaggatgcaattggtattataacgccactaatcgaaaggagaagagaattgcgtagagcagctattgcagctggacagcctttaccagtttttcacgacgcaatcgattggtccgaacaagaggctgaagctgccggtacaggtgcatcatttgaccctgtgatatttcaattaacattgtctttgttggctattcatacaacctatgacttattgcaacagaccatgatagacttgggtaggcaccctgaatatatagaacctctgagacaagaagttgtgcaactgttgagagaagaaggttggaagaaaactactttatttaagatgaagttacttgattccgcaataaaggaaagtcaaagaatgaaaccaggatccattgtcacgatgcgtcgttacgtgaccgaggacatcacactatcctctggtttaacgctaaaaaaaggcaccagattgaatgttgacaatcgtaggttggatgatcccaagatctatgacaatcctgaagtctataatccttatcgtttttatgatatgagatccgaagcaggtaaagatcatggcgcccagctggttagtacaggctctaatcacatgggttttggccatgggcaacattcatgtccgggtagattttttgccgcaaatgagatcaaagtagccctatgtcatattttagtgaaatatgactggaaattatgcccagatacagaaaccaaacctgacactcgtgggatgatagctaagtctagcccagttactgacatccttattaagagaagagaatcagtagagttagatttagaggcgatttaa

SEQ ID NO: 142 - protein, 524 aa, Gibberella fujikuroi; identical to SEQ ID NO: 80

SEQ ID NO: 143 - DNA, 1167 bp, Gibberella fujikuroi
atgaaatatacaacctgtcagatgaacatcttcccttccctatggtcaatgaaaacgtccttcagatggcctagaacatccaaatggtcttcagtttcactatatgacatgatgttgaggactgtagccctgctgtcaggtagagctttcgttggcttaccactatgtagagatgagggatggttgcaggcaagtataggttatacagtccaatgcgtttcaataagagatcagctttttacttggagccccgtattgagaccaattatcgggccattcttgccctcagttagaagtgtgaggagacacttgagatttgctgcagaaattatggctcctcttatcagtcaggctttacaagatgaaaagcaacacagggctgatacacttttagcagatcagaccgaaggtcgtggcacgtttatttcttggttactgagacacctgccagaagaattacgtactcctgagcaagtaggactggaccagatgcttgtatcttttgccgcaattcacactacaacaatggctctaaccaaagtcgtgtgggaattagttaagagaccagaatacatcgaacccttgagaactgaaatgcaagatgtcttcgggcccgatgcggtttcaccagacatttgcattaataaagaggccctatccaggttgcataaattggattcttttattagggaggttcaaagatggtgtccttccacttttgttactcctagccgtagagtgatgaagtccatgacgctgagcaacggaattaaactgcaacgtggtacgagtattgcttttcctgctcatgctatacatatgtcagaagaaacacctactttttcacctgacttttcttctgacttcgaaaatccttcccctagaatttttgatgggttccgttatttaaacttgaggtcaatcaagggacaaggaagccagcatcaagcggctactaccggtcctgattacttaatttttaaccatggtaaacatgcttgccctggtagattttttgctatttcagaaataaaaatgatcttgatagagttactagctaagtacgatttcaggttggaagacggaaaaccagggcctgaactaatgagagttggtactgagacaagattggatacaaaggcaggtttggagatgagacgtagataa

SEQ ID NO: 144 - protein, 388 aa, Gibberella fujikuroi; identical to SEQ ID NO: 46

SEQ ID NO: 145 - DNA, 1581 bp, Gibberella fujikuroi
atggctaaccattccagttcatactaccatgaattttacaaagatcattctcacacagtcttgacgctaatgtctgaaaaacctgtgattttgccatccttaatacttggaacctgtgccgtgttgttatgtatacaatggctgaaaccgcagcctttaatcatggtcaacggtagaaagtttggagaattgtctaatgtaagagccaagcgtgattttaccttcggtgcgagacaattgttagaaaagggtctgaaaatgtcacctgacaaacccttcagaataatgggtgatgttggtgagttgcatatcttgccaccaaaatatgcttatgaagtacgtaacaatgaaaaactatctttcaccatggcagccttcaaatggttttacgcacacttgcctggtttcgaaggtttcagagaaggtaccaatgaatcacatattatgaagttggtcgcaaggcatcaactaacacatcaactgacactagttacaggtgcagtctccgaagagtgtgctcttgttttaaaggatgtttacaccgatagtcccgagtggcatgacatcaccgccaaggacgcaaatatgaaactgatggctaggataactagtagagttttccttggtaaagaaatgtgcagaaaccctcaatggttacgtatcacatctacatatgccgtgattgcattcagagcagtagaggaactaagattatggccatcatggttgagaccagttgttcaatggtttatgccacactgtacgcagtctagagcccttgtgcaagaagcaagggacttaattaatccgttgttggaaaggagaagggaagaaaaagcggaggctgaaaggacgggtgagaaggtaacttacaatgacgctgtggaatggttggacgatttggccagggaaaagggagtgggttatgatcctgcctgcgctcaattaagcctaagtgttgccgccttacattcaactactgacttcttcactcaagttatgtttgatattgctcaaaatcctgagttgatagaaccgttaagagaagagatcatagcagtcttgggcaaacagggatggtccaagaacagtttgtataatcttaaactgatggattctgtgttgaaagagtcacaacgtctaaagccaatagccatcgctagcatgaggagatttactacacacaacgttaaattgtccgatggcgtcatattacccaagaacaagttaacgttagttagcgcacatcagcactgggatccagagtactacaaagacccattaaaatttgatggctatagattctttaacatgagacgtgagcccggcaaagaatcaaaagcacaactagtctctgcgaccccagaccatatggggttcggttatggcctacatgcctgtcctggcaggttttttgcttctgaagaaatcaaaatcgcactgtcacacatcttactgaagtatgattttaagcccgttgaaggtagttccatggagccaagaaagtatggtttgaacatgaacgcaaaccctactgcgaaactgagcgttcgtagaagaaaggaagagattgctatttaa

SEQ ID NO: 146 - protein, 526 aa, Gibberella fujikuroi
MANHSSSYYHEFYKDHSHTVLTLMSEKPVILPSLILGTCAVLLCIQWLKPQPLIMVNGRKFGELSNVRAKRDFTFGARQLLEKGLKMSPDKPFRIMGDVGELHILPPKYAYEVRNNEKLSFTMAAFKWFYAHLPGFEGFREGTNESHIMKLVARHQLTHQLTLVTGAVSEECALVLKDVYTDSPEWHDITAKDANMKLMARITSRVFLGKEMCRNPQWLRITSTYAVIAFRAVEELRLWPSWLRPVVQWFMPHCTQSRALVQEARDLINPLLERRREEKAEAERTGEKVTYNDAVEWLDDLAREKGVGYDPACAQLSLSVAALHSTTDFFTQVMFDIAQNPELIEPLREEIIAVLGKQGWSKNSLYNLKLMDSVLKESQRLKPIAIASMRRFTTHNVKLSDGVILPKNKLTLVSAHQHWDPEYYKDPLKFDGYRFFNMRREPGKESKAQLVSATPDHMGFGYGLHACPGRFFASEEIKIALSHILLKYDFKPVEGSSMEPRKYGLNMNANPTAKLSVRRRKEEIAI

SEQ ID NO: 147 - DNA, 324 bp, Pseudomonas putida
atgtctaaggttgtgtacgtttctcatgatggtacccgtagggaactagatgttgctgatggcgtttcattaatgcaagctgcagtttcaaatggtatatatgatattgtcggcgattgtggtggaagtgcttcctgtgcgacgtgtcatgtctatgtaaacgaagcttttacggataaggtcccagctgctaatgaaagagagataggtatgttggaatgtgttacagcggagttaaaaccaaattccagactatgctgccaaattattatgacccctgaactggatggaatagtagttgatgttcctgacagacaatggtaa

SEQ ID NO: 148 - protein, 107 aa, Pseudomonas putida
MSKVVYVSHDGTRRELDVADGVSLMQAAVSNGIYDIVGDCGGSASCATCHVYVNEAFTDKVPAANEREIGMLECVTAELKPNSRLCCQIIMTPELDGIVVDVPDRQW

SEQ ID NO: 149 - DNA, 1269 bp, Pseudomonas putida
atgaacgcgaacgataatgtcgtaattgtgggtactggattagccggcgtagaggtggcttttggattaagagcgtctggatgggaaggtaatatcaggctggttggggatgccactgttataccacatcacttgcctcctctgtctaaagcttatttggccggcaaagctactgctgagtccttatacttaaggactccggatgcctatgcagcccaaaatatccaattgttgggtggaacgcaggtgacggccatcaacagagatcgtcaacaagttattttgagtgatggaagagcattggactacgatagactggttttggctacaggtggtagacctaggcctctaccagttgcaagtggtgccgttggaaaagccaacaatttcagatatttaaggactctagaagacgctgaatgcattaggaggcagttgatagcagacaatagactagttgtgattgggggcgggtacatcggcttagaagtagcagcgacagcaataaaagcgaacatgcacgttacactattagatacggccgcaagagtactagagagggtaaccgcacctccagtgtctgcattttatgaacatctacatagagaggcgggtgttgacatcaggactggaactcaggtgtgcggtttcgaaatgtccacagatcaacaaaaggtcaccgcggttttgtgtgaagatgggacaagattgccagcagatttggtcattgccgggatcggtctaatccctaattgtgaactggcctctgccgcaggcctgcaagttgataatggtatcgttattaacgaacatatgcaaactagcgacccgttaataatggcggtcggagattgtgctcgttttcatagccagctatacgaccgttgggttagaatagagtcagttcctaacgcattggaacaagccaggaaaatcgctgccatactttgtggtaaagtaccaagagatgaggcagctccatggttctggagcgatcaatacgaaatcggtttgaaaatggttggattgagcgagggctacgacagaattatcgttagaggtagcttggcccaaccagatttttcagttttttacttacaaggtgatagagttctagcagtcgatactgtcaacagaccggtagagttcaaccaaagcaagcaaatcattactgatagactacctgtcgaaccaaaccttcttggagatgaatccgtgccattgaaagaaatcattgccgccgcgaaggccgaactttccagtgcttga

SEQ ID NO: 150 - protein, 422 aa, Pseudomonas putida
MNANDNVVIVGTGLAGVEVAFGLRASGWEGNIRLVGDATVIPHHLPPLSKAYLAGKATAESLYLRTPDAYAAQNIQLLGGTQVTAINRDRQQVILSDGRALDYDRLVLATGGRPRPLPVASGAVGKANNFRYLRTLEDAECIRRQLIADNRLVVIGGGYIGLEVAATAIKANMHVTLLDTAARVLERVTAPPVSAFYEHLHREAGVDIRTGTQVCGFEMSTDQQKVTAVLCEDGTRLPADLVIAGIGLIPNCELASAAGLQVDNGIVINEHMQTSDPLIMAVGDCARFHSQLYDRWVRIESVPNALEQARKIAAILCGKVPRDEAAPWFWSDQYEIGLKMVGLSEGYDRIIVRGSLAQPDFSVFYLQGDRVLAVDTVNRPVEFNQSKQIITDRLPVEPNLLGDESVPLKEIIAAAKAELSSA

SEQ ID NO: 151 - DNA, 945 bp, Cucurbita maxima
atggctaacactggtattccaaccgttgatgtttctttgttcttgtccgaaggtgaaaacgaagctaagaagcaagctattcaaaccattaccgaagcctgttcttcttacggttttttccaaatcgttaaccacggtatcccaatcgaatttttgaaagaagccttgcagttgtccaagacattttttcattatccagacgaaatcaagttgcaatactctccaaaaccaggtgctccattattggctggttttaacaagcaaaagaccaactgcgttgacaagaacgaatacgttttggtttttccaccaggctctaagtttaacatctatccacaagaaccaccacaattcaaagaaaccttggaagagatgttcttgaagttgtctgatgtctccttggtcatcgaatccattttgaatgtttgtttgggtttgccaccaggtttcttgaagcaattcaacaatgatagatcctgggacttcatgaccaacttgtattattacccagctgctgatgttggtgaaaacggtttgattcatcatgaagatgctaactgcatcaccttggttattcaagatgatgctggtggtttacaagtccaaaaagattctgaatggattccagttactccagttgaaggtgctatcgttgttaacgttggtgatatcatccaagtcttgtccaacaagaagttcaagtctgctactcacagagttgttagacagaagggtaaagaaagatactccttcgctttcttcagatcattgcatggtgataagtgggttgaaccattgccagaattcaccaaagaaattggtgaaaagccaaagtacaagggcttcgaattcaatgaatacttggccttgagattgaagaacaagactcatccaccatctagagttgaagatgagatttccatcaagcactacgagatcaactga

SEQ ID NO: 152 - protein, 314 aa, Cucurbita maxima
MANTGIPTVDVSLFLSEGENEAKKQAIQTITEACSSYGFFQIVNHGIPIEFLKEALQLSKTFFHYPDEIKLQYSPKPGAPLLAGFNKQKTNCVDKNEYVLVFPPGSKFNIYPQEPPQFKETLEEMFLKLSDVSLVIESILNVCLGLPPGFLKQFNNDRSWDFMTNLYYYPAADVGENGLIHHEDANCITLVIQDDAGGLQVQKDSEWIPVTPVEGAIVVNVGDIIQVLSNKKFKSATHRVVRQKGKERYSFAFFRSLHGDKWVEPLPEFTKEIGEKPKYKGFEFNEYLALRLKNKTHPPSRVEDEISIKHYEIN

SEQ ID NO: 153 - DNA, 1971 bp, Artificial Sequence
  Codon-optimized nucleotide sequence
atgtcctctagatctaccccaagaaaagaacctatttgcgcttctggtattttcccatccgttgataatcaagctttggaagttccaccaggtattcaaaagttgacctaccaatctttgacctcctctacctctttcagattattgcaagttttgtccgatggtggtagagatattttgagatgcaagatgttcgatgctgatttggctgctagagaaccaccaagatatattgctttgtcttacacctggcacgaagaatctttgccaaaaacttttagaccagtcttgatcaacgacaagtacttgaacgtttctttgaacttgtggaacttcttgcaaaactacagagaaacctccggtgaaagaattatctggattgatcaaatctgcatcaatcaagaagataaggacgaatgcgttcaacaaattggtcaaatgtgcaagatctaccaatgcgcttctatggatttgttctggattggtgaaccaggtgaaaatgctgaagctgttttggatttgttgtcctccttgaacagattggaaacctacttgttggaatccggttcttctagaccaggtatttctgctttgttgaacccaattttcatgagagctgttggtttgccagaacatgataatccaatttggggttccttgatgcaattcatttctagaactgctttccaaagagcctggatcattcaagaagttgctgtttctagaaccaccgctattttttgtggtttgttgatgttgccattcgatgttgttggtagagctgctacttttttggttgaatcctcttggattaaggttttccacgaaatgtacaacgtttctggtgctgctggttttattactggtatgatgaactgcagagtcagacatcaagaaggtgaacatcaatctttggacttgttgttggcttctaccagaagattcaaagctacaaagccagttgataagatcttcgccttgattaacttggctgaatccggtagaaaagaagctttgccaccagctttaagaccagattacagaaaatctatcgtcggtgttttcagagatgtcaccttgtacttgattagacaaggttccttggatgttttgtccggtgttgaagatgttaagttcagacaaatccacgaattgccatcttggattccagattactctgttcatcaagttgcctccattttgtgtatgccaccaagaccaggttggttgacattatatgctgctgctgttggtagagatgtttccgttcaaaattctccagctgatccaaacattttgaccttgtctgcttacaaggttgacaccatttctaagattggttccattgccgaagaatccatctacttgactttggaaaaatgggcctctatggttgatttttctgctgcttatccaactgttaacggtaacacttgtccaatgattgatgctttttggagaaccttgattggtaacattggtttgggtacttctcaatacccagtttctgaagattgggctcattcttttgctgttttcgctttacaagccagagaagaattgcaacatcacttctcttcatcctctgatactgaaagagctgctttggaatctccaatagttactccaggtatcgactccattttgagattggttaaggatcattaccacggtaacaacgattctgatcaagatggtggtttgtacgaatctaccatgcatcatgtttcttggtacagaagattattcttgaccaacggtggttactttggtttggctcatccatcttctcaaccaggtgatgaagttgttttgttgtctggtggtagagttccattcgttgttagaagagtttctgccgaaagaagagaatgctattctatcgttggtgaaacctacgttcatggtattatggacggtgaattattggatgctactgacggtaaatgggaagacttgcaattcaagtga

SEQ ID NO: 154 - protein, 656 aa, Artificial Sequence
  polypeptide from codon opitmized open reading frame 1
MSSRSTPRKEPICASGIFPSVDNQALEVPPGIQKLTYQSLTSSTSFRLLQVLSDGGRDILRCKMFDADLAAREPPRYIALSYTWHEESLPKTFRPVLINDKYLNVSLNLWNFLQNYRETSGERIIWIDQICINQEDKDECVQQIGQMCKIYQCASMDLFWIGEPGENAEAVLDLLSSLNRLETYLLESGSSRPGISALLNPIFMRAVGLPEHDNPIWGSLMQFISRTAFQRAWIIQEVAVSRTTAIFCGLLMLPFDVVGRAATFLVESSWIKVFHEMYNVSGAAGFITGMMNCRVRHQEGEHQSLDLLLASTRRFKATKPVDKIFALINLAESGRKEALPPALRPDYRKSIVGVFRDVTLYLIRQGSLDVLSGVEDVKFRQIHELPSWIPDYSVHQVASILCMPPRPGWLTLYAAAVGRDVSVQNSPADPNILTLSAYKVDTISKIGSIAEESIYLTLEKWASMVDFSAAYPTVNGNTCPMIDAFWRTLIGNIGLGTSQYPVSEDWAHSFAVFALQAREELQHHFSSSSDTERAALESPIVTPGIDSILRLVKDHYHGNNDSDQDGGLYESTMHHVSWYRRLFLTNGGYFGLAHPSSQPGDEVVLLSGGRVPFVVRRVSAERRECYSIVGETYVHGIMDGELLDATDGKWEDLQFK

SEQ ID NO: 155 - DNA, 1785 bp, Artificial Sequence
  Codon-optimized nucleotide sequence
atggcagatagtttggccgttagacatgcagctgctttaaaattaatcgaagatttaacgtcttcattgaatgatgtagaacctttaggagatattagcagagcgcaagcggattatgatgctgccgaagaaagacatagaagggaacaagacccggctaggaaaagggcattgtgcagggaactagtaaggtacggcgatagactggaggaaattgagaagcaacataaggaagctgaagccaagtgtaaagaacaactagatctatttgacacaagactagcgaaagagggttaccgtaaactagccacaagggcgtcctctataactggtactaaccaaactacacaccaatcatccaatacttctggaaacttaattcagacacctgatccgaactacggacaactttcaggctttacaaacgacagagctactcatgaaaacaccgaatcaccaggaacgttgcctcaatcttccactattaggaacacaatagaaccgaggctaactcccagtagaacaaattcagctgctccatccagaggtatttccacggatatcgatcaacaagtcagaatagaacctacagtccaaacagacaggtctaatcaaaggcgtgacaacccctctagttctagaccagccaagagacagagacaaggcgcatctagtgaaacagttacagaaaggacaataaccttcgatgaggtatatcaggggggaaaggctaggtggaaatacaggatcaccaaggtgcatggattatattacgtattcggctgtgagaagcatgaaaaacattttggtaaagaaaatccattacaatcagcaatgtcccatttaaagggtaaaggccattcttgtaagagacctaatgctactcaagctttacgtagtctgggaatacaagttttaccatgtacggatagagatcttgagctaaacaacaaagccgttgacaggtacctggcagaacaagaagaaaagaataaaagaagaaaggcgtctgtaaaagatttaagtcaagcacctcaaactggtgaaatttatatggcatggttcggagatgatgataaaggctactggctacacgcctttctggtcataccattctttcctaggccaggcgacggcatggacgttcaaactgtaacaggctccaatttaaacgatgatattccagcctgctataggttcgatgaaactactgatgggtataactggactgaggactacaaagaatatggcaaatacgcaaataatagagtttacccaattatgtgtcttgtgggtcagatccctcataaagtcgattggttacctgtctgccatttcagaaaacttaatcttgaagatgaagacctagaggacaaagatgtcattaaagcgtttatgcgtaaaaataccaccgggaatacaggttacggcaacgaggttgatgatgaatcagaagatctatatggtgattcctttgcaggtgatgatgatgtgcctacaagctctgaaaggagacagtctccgataggaaatagttctgaaaatatcaatactgatcaaagcatacaagcaggcgccaccgctgaaaatcaagaaagcggtaccttaggtccaaacttagcgactcaagaggttaaagatgaattagcgacgatcgggagaggcgatggtgctactagtgctgctgatcaaccggcaagagctaggcaaatgtctgtccgtcgtcgttggccttctgctagaaagggaccaccggatatggaaaccgttagcgattcagagtaa

SEQ ID NO: 156 - protein, 594 aa, Gibberella fujikuroi
MADSLAVRHAAALKLIEDLTSSLNDVEPLGDISRAQADYDAAEERHRREQDPARKRALCRELVRYGDRLEEIEKQHKEAEAKCKEQLDLFDTRLAKEGYRKLATRASSITGTNQTTHQSSNTSGNLIQTPDPNYGQLSGFTNDRATHENTESPGTLPQSSTIRNTIEPRLTPSRTNSAAPSRGISTDIDQQVRIEPTVQTDRSNQRRDNPSSSRPAKRQRQGASSETVTERTITFDEVYQGGKARWKYRITKVHGLYYVFGCEKHEKHFGKENPLQSAMSHLKGKGHSCKRPNATQALRSLGIQVLPCTDRDLELNNKAVDRYLAEQEEKNKRRKASVKDLSQAPQTGEIYMAWFGDDDKGYWLHAFLVIPFFPRPGDGMDVQTVTGSNLNDDIPACYRFDETTDGYNWTEDYKEYGKYANNRVYPIMCLVGQIPHKVDWLPVCHFRKLNLEDEDLEDKDVIKAFMRKNTTGNTGYGNEVDDESEDLYGDSFAGDDDVPTSSERRQSPIGNSSENINTDQSIQAGATAENQESGTLGPNLATQEVKDELATIGRGDGATSAADQPARARQMSVRRRWPSARKGPPDMETVSDSE

SEQ ID NO: 157 - DNA, 2085 bp, Aspergillus niger
atggctcaattggataccttggatttggttgttttggccgttttgttggttggttctgttgcttattttaccaagggtacttattgggctgttgctaaagatccatatgcttctactggtccagctatgaatggtgctgctaaagctggtaaaaccagaaacattatcgaaaagatggaagaaaccggtaagaactgcgttattttctacggttctcaaactggtactgctgaagattatgcttccagattggctaaagaaggttctcaaagattcggtttgaaaaccatggttgccgatttggaagaatacgactacgaaaacttggaccaattcccagaagataaggttgcttttttcgttttggctacttacggtgaaggtgaacctactgataatgctgttgaattctaccaattcttcaccggtgatgatgttgcttttgaatctgcttctgctgacgaaaaaccattgtctaagttgaagtacgttgctttcggtttgggtaacaacacttacgaacattacaacgccatggttagacaagttgatgctgcttttcaaaagttgggtccacaaagaattggttctgctggtgaaggtgatgatggtgctggtactatggaagaagattttttggcttggaaagaacctatgtgggctgctttgtctgaatctatggacttggaagaaagagaagctgtttacgaaccagttttctgtgttaccgaaaacgaatctttgtccccagaagatgaaactgtttatttgggtgaacctacccaatctcacttgcaaggtactccaaaaggtccatattctgctcataatccattcattgctccaatcgctgaatccagagaattattcactgttaaggacagaaactgcttgcacatggaaatttctattgccggttctaacttgtcttaccaaaccggtgatcatattgctgtttggccaactaatgctggtgctgaagttgatagattcttgcaagtttttggtttggaaggtaagagagactccgttattaacatcaagggtattgatgttaccgccaaggttccaattccaactccaactacttatgatgctgccgtcagatattacatggaagtttgtgctccagtctccagacaatttgttgctactttggctgcttttgctccagatgaagaatctaaagctgaaatcgttagattgggttcccacaaggattactttcacgaaaaggttaccaatcaatgcttcaatatggctcaagccttgcaatctattacctctaaaccattttctgccgtcccattctctttgttgattgaaggtattaccaagttgcaacctagatattactccatctcctcctcttcattggttcaaaaggataagatttccatcaccgccgttgttgaatctgttagattgccaggtgcttctcatatggttaagggtgttactaccaattacttgttggccttgaagcaaaagcaaaacggtgatccatctccagatccacatggtttgacttattctattactggtccaagaaacaagtacgatggtatccatgttccagttcatgttagacactctaacttcaagttgccatctgatccatctagaccaattatcatggttggtccaggtactggtgttgctccttttagaggttttattcaagaaagagctgctttggctgctaagggtgaaaaagttggtccaactgttttgttcttcggttgcagaaaatccgacgaagatttcttgtacaaggacgaatggaaaacctaccaagatcaattgggtgacaacttgaagattattaccgccttttctagagaaggtccacaaaaggtttacgtccaacatagattgagagaacactccgaattggtttccgatttgttgaaacaaaaggccaccttttacgtttgtggtgatgctgctaatatggccagagaagttaatttggttttgggtcaaattatcgctgcccaaagaggtttgccagctgaaaaaggtgaagaaatggtcaaacacatgagaagaagaggtagataccaagaagatgtctggtcttaa

SEQ ID NO: 158 - protein, 694 aa, Aspergillus niger
MAQLDTLDLVVLAVLLVGSVAYFTKGTYWAVAKDPYASTGPAMNGAAKAGKTRNIIEKMEETGKNCVIFYGSQTGTAEDYASRLAKEGSQRFGLKTMVADLEEYDYENLDQFPEDKVAFFVLATYGEGEPTDNAVEFYQFFTGDDVAFESASADEKPLSKLKYVAFGLGNNTYEHYNAMVRQVDAAFQKLGPQRIGSAGEGDDGAGTMEEDFLAWKEPMWAALSESMDLEEREAVYEPVFCVTENESLSPEDETVYLGEPTQSHLQGTPKGPYSAHNPFIAPIAESRELFTVKDRNCLHMEISIAGSNLSYQTGDHIAVWPTNAGAEVDRFLQVFGLEGKRDSVINIKGIDVTAKVPIPTPTTYDAAVRYYMEVCAPVSRQFVATLAAFAPDEESKAEIVRLGSHKDYFHEKVTNQCFNMAQALQSITSKPFSAVPFSLLIEGITKLQPRYYSISSSSLVQKDKISITAVVESVRLPGASHMVKGVTTNYLLALKQKQNGDPSPDPHGLTYSITGPRNKYDGIHVPVHVRHSNFKLPSDPSRPIIMVGPGTGVAPFRGFIQERAALAAKGEKVGPTVLFFGCRKSDEDFLYKDEWKTYQDQLGDNLKIITAFSREGPQKVYVQHRLREHSELVSDLLKQKATFYVCGDAANMAREVNLVLGQIIAAQRGLPAEKGEEMVKHMRRRGRYQEDVWS

SEQ ID NO: 159 - DNA, 426 bp, Artificial Sequence
  Codon-optimized nucleotide sequence
atgtccgccaagaaagaattcaccatgcaagatgttgctgaacacaatacctcttccgatatctacatggttgttcacgataaggtttacgattgcaccaagttcttggatgaacatccaggtggtgaagaagttatgttggacgttgctggtcaagatgctactgaagcttttgaagatgttggtcattctgatgaagccagagaagttttggatggtttgttggttggtgaattgaaaagattgccaggtgatgaaggtccaaagagacaaattgctaactccaatcaaggttctggtaaagctgatccagctggttcttctttgaatacttatgctatcgttgttgccgttggtttcattgcttatgttgcttacaactacttgcaaaagcaacaagaagctcaaggtcaagcttctgcttaa

SEQ ID NO: 160 - protein, 141 aa, Gibberella fujikuroi
MSAKKEFTMQDVAEHNTSSDIYMVVHDKVYDCTKFLDEHPGGEEVMLDVAGQDATEAFEDVGHSDEAREVLDGLLVGELKRLPGDEGPKRQIANSNQGSGKADPAGSSLNTYAIVVAVGFIAYVAYNYLQKQQEAQGQASA

SEQ ID NO: 161 - DNA, 987 bp, Cucumis sativus
atggacttgaagaatcaaaccttcaccttccatttcgatatggctaaggatactggtattccaaccgttgatttgtctgttttctctgctcaaaacgaaaccgaagctaagaagaaggctttcgaaactatctaccaagcctgttcttcttacggtttcttccaaatcgttaaccatggtgttccaatcgaattcttggaagaagctttggaattgtccagaacattcttccattacccagatgacatcaagttgaagtactcttctaaaccaggtgctccattattggctggttttaacaagcaaaagaagaactgcgttgacaagaacgaatacgttttggtttttccaccaggctctaactacaatatctatccacaagaaccaccacaattcaaagaattattggaagaaatgttcaagaagttgtccaaggtctgcttgttgttggaatctatcgttaacgaatctttgggtttgccaccagattttttgaagcagtacaacaacgatagatcctgggattttatgaccaccttgtactacttttctgctactgaagaaggtgaaaacggtttgactcatcatgaagatggtaactgcattaccttggttttccaagatgataccggtggtttacaagttagaaaagatggtgaatggatcccagttgttccagttgaaggtgctatcgttgttaacattggtgatgttatccaggtcttgtccaacaagaaattcaagtctgctacccacagagttgttagacaaaagggtaaagaaagattctcctacgccttcttccataacttgcatggtgataagtgggttgaaccattgccacaattcactgaagaaattggtgaaaagccaaagtacaagggtttccaattcaaggattaccaagccttgagattgaagaacaaaactcatccaccatctagagttgaggacgaaattagaattacccactacgagatcagctaa

SEQ ID NO: 162 - protein, 328 aa, Cucumis sativus
MDLKNQTFTFHFDMAKDTGIPTVDLSVFSAQNETEAKKKAFETIYQACSSYGFFQIVNHGVPIEFLEEALELSRTFFHYPDDIKLKYSSKPGAPLLAGFNKQKKNCVDKNEYVLVFPPGSNYNIYPQEPPQFKELLEEMFKKLSKVCLLLESIVNESLGLPPDFLKQYNNDRSWDFMTTLYYFSATEEGENGLTHHEDGNCITLVFQDDTGGLQVRKDGEWIPVVPVEGAIVVNIGDVIQVLSNKKFKSATHRVVRQKGKERFSYAFFHNLHGDKWVEPLPQFTEEIGEKPKYKGFQFKDYQALRLKNKTHPPSRVEDEIRITHYEIS

SEQ ID NO: 163 - DNA, 1545 bp, Castanea mollissima
atggcctccatcacccatttcttacaagattttcaagctactccattcgctactgcttttgctgttggtggtgtttctttgttgatattcttcttcttcatccgtggtttccactctactaagaaaaacgaatattacaagttgccaccagttccagttgttccaggtttgccagttgttggtaatttgttgcaattgaaagaaaagaagccatacaagactttcttgagatgggctgaaattcatggtccaatctactctattagaactggtgcttctaccatggttgttgttaactctactcatgttgccaaagaagctatggttaccagattctcttcaatctctaccagaaagttgtccaaggctttggaattattgacctccaacaaatctatggttgccacctctgattacaacgaatttcacaagatggtcaagaagtacatcttggccgaattattgggtgctaatgctcaaaagagacacagaattcatagagacaccttgatcgaaaacgtcttgaacaaattgcatgcccataccaagaattctccattgcaagctgttaacttcagaaagatcttcgaatctgaattattcggtttggctatgaagcaagccttgggttatgatgttgattccttgttcgttgaagaattgggtactaccttgtccagagaagaaatctacaacgttttggtcagtgacatgttgaagggtgctattgaagttgattggagagactttttcccatacttgaaatggatcccaaacaagtccttcgaaatgaagattcaaagattggcctctagaagacaagccgttatgaactctattgtcaaagaacaaaagaagtccattgcctctggtaagggtgaaaactgttacttgaattacttgttgtccgaagctaagactttgaccgaaaagcaaatttccattttggcctgggaaaccattattgaaactgctgatacaactgttgttaccactgaatgggctatgtacgaattggctaaaaacccaaagcaacaagacagattatacaacgaaatccaaaacgtctgcggtactgataagattaccgaagaacatttgtccaagttgccttacttgtctgctgtttttcacgaaaccttgagaaagtattctccatctccattggttccattgagatacgctcatgaagatactcaattgggtggttattatgttccagccggtactgaaattgctgttaatatctacggttgcaacatggacaagaatcaatgggaaactccagaagaatggaagccagaaagatttttggacgaaaagtacgatccaatggacatgtacaagactatgtcttttggttccggtaaaagagtttgcgctggttctttacaagctagtttgattgcttgtacctccatcggtagattggttcaagaatttgaatggagattgaaagacggtgaagttgaaaacgttgataccttgggtttgactacccataagttgtatccaatgcaagctatcttgcaacctagaaactga

SEQ ID NO: 164 - protein, 514 aa, Castanea mollissima
MASITHFLQDFQATPFATAFAVGGVSLLIFFFFIRGFHSTKKNEYYKLPPVPVVPGLPVVGNLLQLKEKKPYKTFLRWAEIHGPIYSIRTGASTMVVVNSTHVAKEAMVTRFSSISTRKLSKALELLTSNKSMVATSDYNEFHKMVKKYILAELLGANAQKRHRIHRDTLIENVLNKLHAHTKNSPLQAVNFRKIFESELFGLAMKQALGYDVDSLFVEELGTTLSREEIYNVLVSDMLKGAIEVDWRDFFPYLKWIPNKSFEMKIQRLASRRQAVMNSIVKEQKKSIASGKGENCYLNYLLSEAKTLTEKQISILAWETIIETADTTVVTTEWAMYELAKNPKQQDRLYNEIQNVCGTDKITEEHLSKLPYLSAVFHETLRKYSPSPLVPLRYAHEDTQLGGYYVPAGTEIAVNIYGCNMDKNQWETPEEWKPERFLDEKYDPMDMYKTMSFGSGKRVCAGSLQASLIACTSIGRLVQEFEWRLKDGEVENVDTLGLTTHKLYPMQAILQPRN

SEQ ID NO: 165 - DNA, 2133 bp, Stevia rebaudiana
atgcaatcagattcagtcaaagtctctccatttgatttggtttccgctgctatgaatggcaaggcaatggaaaagttgaacgctagtgaatctgaagatccaacaacattgcctgcactaaagatgctagttgaaaatagagaattgttgacactgttcacaacttccttcgcagttcttattgggtgtcttgtatttctaatgtggagacgttcatcctctaaaaagctggtacaagatccagttccacaagttatcgttgtaaagaagaaagagaaggagtcagaggttgatgacgggaaaaagaaagtttctattttctacggcacacaaacaggaactgccgaaggttttgctaaagcattagtcgaggaagcaaaagtgagatatgaaaagacctctttcaaggttatcgatctagatgactacgctgcagatgatgatgaatatgaggaaaaactgaaaaaggaatccttagccttcttcttcttggccacatacggtgatggtgaacctactgataatgctgctaacttctacaagtggttcacagaaggcgacgataaaggtgaatggctgaaaaagttacaatacggagtatttggtttaggtaacagacaatatgaacatttcaacaagatcgctattgtagttgatgataaacttactgaaatgggagccaaaagattagtaccagtaggattaggggatgatgatcagtgtatagaagatgacttcaccgcctggaaggaattggtatggccagaattggatcaacttttaagggacgaagatgatacttctgtgactaccccatacactgcagccgtattggagtacagagtggtttaccatgataaaccagcagactcatatgctgaagatcaaacccatacaaacggtcatgttgttcatgatgcacagcatccttcaagatctaatgtggctttcaaaaaggaactacacacctctcaatcagataggtcttgtactcacttagaattcgatatttctcacacaggactgtcttacgaaactggcgatcacgttggcgtttattccgagaacttgtccgaagttgtcgatgaagcactaaaactgttagggttatcaccagacacatacttctcagtccatgctgataaggaggatgggacacctatcggtggtgcttcactaccaccaccttttcctccttgcacattgagagacgctctaaccagatacgcagatgtcttatcctcacctaaaaaggtagctttgctggcattggctgctcatgctagtgatcctagtgaagccgataggttaaagttcctggcttcaccagccggaaaagatgaatatgcacaatggatcgtcgccaaccaacgttctttgctagaagtgatgcaaagttttccatctgccaagcctccattaggtgtgttcttcgcagcagtagctccacgtttacaaccaagatactactctatcagttcatctcctaagatgtctcctaacagaatacatgttacatgtgctttggtgtacgagactactccagcaggcagaattcacagaggattgtgttcaacctggatgaaaaatgctgtccctttaacagagtcacctgattgctctcaagcatccattttcgttagaacatcaaatttcagacttccagtggatccaaaagttccagtcattatgataggaccaggcactggtcttgccccattcaggggctttcttcaagagagattggccttgaaggaatctggtacagaattgggttcttctatctttttctttggttgccgtaatagaaaagttgactttatctacgaggacgagcttaacaattttgttgagacaggagcattgtcagaattgatcgtcgcattttcaagagaagggactgccaaagagtacgttcagcacaagatgagtcaaaaagcctccgatatatggaaacttctaagtgaaggtgcctatctttatgtctgtggcgatgcaaagggcatggccaaggatgtccatagaactctgcatacaattgttcaggaacaagggagtctggattcttccaaggctgaattgtacgtcaaaaacttacagatgtctggaagatacttaagagatgtttggtaa

SEQ ID NO: 166 - protein, 710 aa, Stevia rebaudiana
MQSDSVKVSPFDLVSAAMNGKAMEKLNASESEDPTTLPALKMLVENRELLTLFTTSFAVLIGCLVFLMWRRSSSKKLVQDPVPQVIVVKKKEKESEVDDGKKKVSIFYGTQTGTAEGFAKALVEEAKVRYEKTSFKVIDLDDYAADDDEYEEKLKKESLAFFFLATYGDGEPTDNAANFYKWFTEGDDKGEWLKKLQYGVFGLGNRQYEHFNKIAIVVDDKLTEMGAKRLVPVGLGDDDQCIEDDFTAWKELVWPELDQLLRDEDDTSVTTPYTAAVLEYRVVYHDKPADSYAEDQTHTNGHVVHDAQHPSRSNVAFKKELHTSQSDRSCTHLEFDISHTGLSYETGDHVGVYSENLSEVVDEALKLLGLSPDTYFSVHADKEDGTPIGGASLPPPFPPCTLRDALTRYADVLSSPKKVALLALAAHASDPSEADRLKFLASPAGKDEYAQWIVANQRSLLEVMQSFPSAKPPLGVFFAAVAPRLQPRYYSISSSPKMSPNRIHVTCALVYETTPAGRIHRGLCSTWMKNAVPLTESPDCSQASIFVRTSNFRLPVDPKVPVIMIGPGTGLAPFRGFLQERLALKESGTELGSSIFFFGCRNRKVDFIYEDELNNFVETGALSELIVAFSREGTAKEYVQHKMSQKASDIWKLLSEGAYLYVCGDAKGMAKDVHRTLHTIVQEQGSLDSSKAELYVKNLQMSGRYLRDVW

SEQ ID NO: 167 - DNA, 2070 bp, Rubus suavissimus
atgtcctccaactccgatttggtcagaagattggaatctgttttgggtgtttctttcggtggttctgttactgattccgttgttgttattgctaccacctctattgctttggttatcggtgttttggttttgttgtggagaagatcctctgacagatctagagaagttaagcaattggctgttccaaagccagttactatcgttgaagaagaagatgaattcgaagttgcttctggtaagaccagagtttctattttctacggtactcaaactggtactgctgaaggttttgctaaggctttggctgaagaaatcaaagccagatacgaaaaagctgccgttaaggttattgatttggatgattacacagccgaagatgacaaatacggtgaaaagttgaagaaagaaactatggccttcttcatgttggctacttatggtgatggtgaacctactgataatgctgctagattttacaagtggttcaccgaaggtactgatagaggtgtttggttggaacatttgagatacggtgtattcggtttgggtaacagacaatacgaacacttcaacaagattgccaaggttgttgatgatttgttggttgaacaaggtgccaagagattggttactgttggtttgggtgatgatgatcaatgcatcgaagatgatttctccgcttggaaagaagccttgtggccagaattggatcaattattgcaagatgataccaacaccgtttctactccatacactgctgttattccagaatacagagttgttatccacgatccatctgttacctcttatgaagatccatactctaacatggctaacggtaatgcctcttacgatattcatcatccatgtagagctaacgttgccgtccaaaaagaattgcataagccagaatctgacagaagttgcatccatttggaattcgatattttcgctactggtttgacttacgaaaccggtgatcatgttggtgtttacgctgataattgtgatgatactgtagaagaagccgctaagttgttgggtcaaccattggatttgttgttctccattcataccgataacaacgacggtacttctttgggttcttctttgccaccaccatttccaggtccatgtactttgagaactgctttggctagatatgccgatttgttgaatccaccaaaaaaggctgctttgattgctttagctgctcatgctgatgaaccatctgaagctgaaagattgaagttcttgtcatctccacaaggtaaggacgaatattctaaatgggttgtcggttcccaaagatccttggttgaagttatggctgaatttccatctgctaaaccaccattgggtgtattttttgctgctgttgttcctagattgcaacctagatattactccatctcttccagtccaagatttgctccacatagagttcatgttacttgcgctttggtttatggtccaactccaactggtagaattcacagaggtgtatgttcattctggatgaagaatgttgtcccattggaaaagtctcaaaactgttcttgggccccaattttcatcagacaatctaatttcaagttgccagccgatcattctgttccaatagttatggttggtccaggtactggtttagctccttttagaggtttcttacaagaaagattggccttgaaagaagaaggtgctcaagttggtcctgctttgttgttttttggttgcagaaacagacaaatggacttcatctacgaagtcgaattgaacaactttgtcgaacaaggtgctttgtccgaattgatcgttgctttttcaagagaaggtccatccaaagaatacgtccaacataagatggttgaaaaggcagcttacatgtggaacttgatttctcaaggtggttacttctacgtttgtggtgatgctaaaggtatggctagagatgttcatagaacattgcataccatcgtccaacaagaagaaaaggttgattctaccaaggccgaatccatcgttaagaaattgcaaatggacggtagatacttgagagatgtttggtga

SEQ ID NO: 168 - protein, 689 aa, Rubus suavissimus
MSSNSDLVRRLESVLGVSFGGSVTDSVVVIATTSIALVIGVLVLLWRRSSDRSREVKQLAVPKPVTIVEEEDEFEVASGKTRVSIFYGTQTGTAEGFAKALAEEIKARYEKAAVKVIDLDDYTAEDDKYGEKLKKETMAFFMLATYGDGEPTDNAARFYKWFTEGTDRGVWLEHLRYGVFGLGNRQYEHFNKIAKVVDDLLVEQGAKRLVTVGLGDDDQCIEDDFSAWKEALWPELDQLLQDDTNTVSTPYTAVIPEYRVVIHDPSVTSYEDPYSNMANGNASYDIHHPCRANVAVQKELHKPESDRSCIHLEFDIFATGLTYETGDHVGVYADNCDDTVEEAAKLLGQPLDLLFSIHTDNNDGTSLGSSLPPPFPGPCTLRTALARYADLLNPPKKAALIALAAHADEPSEAERLKFLSSPQGKDEYSKWVVGSQRSLVEVMAEFPSAKPPLGVFFAAVVPRLQPRYYSISSSPRFAPHRVHVTCALVYGPTPTGRIHRGVCSFWMKNVVPLEKSQNCSWAPIFIRQSNFKLPADHSVPIVMVGPGTGLAPFRGFLQERLALKEEGAQVGPALLFFGCRNRQMDFIYEVELNNFVEQGALSELIVAFSREGPSKEYVQHKMVEKAAYMWNLISQGGYFYVCGDAKGMARDVHRTLHTIVQQEEKVDSTKAESIVKKLQMDGRYLRDVW

SEQ ID NO: 169 - DNA, 1536 bp, Rubus suavissimus
atggctaccttgttggaacattttcaagctatgccattcgctattccaattgctttggctgctttgtcttggttgtttttgttctacatcaaggtttctttcttctccaacaaatccgctcaagctaaattgccaccagttccagttgttccaggtttgccagttattggtaatttgttgcaattgaaagaaaagaagccataccaaaccttcactagatgggctgaagaatatggtccaatctactctattagaactggtgcttctactatggttgtcttgaacactactcaagttgccaaagaagctatggttaccagatacttgtctatctctaccagaaagttgtccaacgccttgaaaattttgaccgctgataagtgcatggttgccatttctgattacaacgatttccacaagatgatcaagagatatatcttgtctaacgttttgggtccatctgcccaaaaaagacatagatctaacagagataccttgagagccaacgtttgttctagattgcattcccaagttaagaactctccaagagaagctgtcaactttagaagagttttcgaatgggaattattcggtatcgctttgaaacaagccttcggtaaggatattgaaaagccaatctacgtcgaagaattgggtactactttgtccagagatgaaatcttcaaggttttggtcttggacattatggaaggtgccattgaagttgattggagagattttttcccatacttgcgttggattccaaacaccagaatggaaactaagatccaaagattatactttagaagaaaggccgttatgaccgccttgattaacgaacaaaagaaaagaattgcctccggtgaagaaatcaactgctacatcgatttcttgttgaaagaaggtaagaccttgaccatggaccaaatctctatgttgttgtgggaaaccgttattgaaactgctgataccacaatggttactactgaatgggctatgtacgaagttgctaaggattctaaaagacaagacagattataccaagaaatccaaaaggtctgcggttctgaaatggttacagaagaatacttgtcccaattgccatacttgaatgctgttttccacgaaactttgagaaaacattctccagctgctttggttccattgagatatgctcatgaagatactcaattgggtggttattacattccagccggtactgaaattgccattaacatctacggttgcaacatggacaaacaccaatgggaatctccagaagaatggaagccagaaagatttttggatcctaagtttgacccaatggacttgtacaaaactatggcttttggtgctggtaaaagagtttgcgctggttctttacaagctatgttgattgcttgtccaaccatcggtagattggttcaagaatttgaatggaagttgagagatggtgaagaagaaaacgttgatactgttggtttgaccacccataagagatatccaatgcatgctattttgaagccaagatcttaa

SEQ ID NO: 170 - protein, 511 aa, Rubus suavissimus
MATLLEHFQAMPFAIPIALAALSWLFLFYIKVSFFSNKSAQAKLPPVPVVPGLPVIGNLLQLKEKKPYQTFTRWAEEYGPIYSIRTGASTMVVLNTTQVAKEAMVTRYLSISTRKLSNALKILTADKCMVAISDYNDFHKMIKRYILSNVLGPSAQKRHRSNRDTLRANVCSRLHSQVKNSPREAVNFRRVFEWELFGIALKQAFGKDIEKPIYVEELGTTLSRDEIFKVLVLDIMEGAIEVDWRDFFPYLRWIPNTRMETKIQRLYFRRKAVMTALINEQKKRIASGEEINCYIDFLLKEGKTLTMDQISMLLWETVIETADTTMVTTEWAMYEVAKDSKRQDRLYQEIQKVCGSEMVTEEYLSQLPYLNAVFHETLRKHSPAALVPLRYAHEDTQLGGYYIPAGTEIAINIYGCNMDKHQWESPEEWKPERFLDPKFDPMDLYKTMAFGAGKRVCAGSLQAMLIACPTIGRLVQEFEWKLRDGEEENVDTVGLTTHKRYPMHAILKPRS

SEQ ID NO: 171 - DNA, 1542 bp, Stevia rebaudiana
atggatgctgtgacgggtttgttaactgtcccagcaaccgctataactattggtggaactgctgtagcattggcggtagcgctaatcttttggtacctgaaatcctacacatcagctagaagatcccaatcaaatcatcttccaagagtgcctgaagtcccaggtgttccattgttaggaaatctgttacaattgaaggagaaaaagccatacatgacttttacgagatgggcagcgacatatggacctatctatagtatcaaaactggggctacaagtatggttgtggtatcatctaatgagatagccaaggaggcattggtgaccagattccaatccatatctacaaggaacttatctaaagccctgaaagtacttacagcagataagacaatggtcgcaatgtcagattatgatgattatcataaaacagttaagagacacatactgaccgccgtcttgggtcctaatgcacagaaaaagcatagaattcacagagatatcatgatggataacatatctactcaacttcatgaattcgtgaaaaacaacccagaacaggaagaggtagaccttagaaaaatctttcaatctgagttattcggcttagctatgagacaagccttaggaaaggatgttgaaagtttgtacgttgaagacctgaaaatcactatgaatagagacgaaatctttcaagtccttgttgttgatccaatgatgggagcaatcgatgttgattggagagacttctttccatacctaaagtgggtcccaaacaaaaagttcgaaaatactattcaacaaatgtacatcagaagagaagctgttatgaaatctttaatcaaagagcacaaaaagagaatagcgtcaggcgaaaagctaaatagttatatcgattaccttttatctgaagctcaaactttaaccgatcagcaactattgatgtccttgtgggaaccaatcattgaatcttcagatacaacaatggtcacaacagaatgggcaatgtacgaattagctaaaaaccctaaattgcaagataggttgtacagagacattaagtccgtctgtggatctgaaaagataaccgaagagcatctatcacagctgccttacattacagctattttccacgaaacactgagaagacactcaccagttcctatcattcctctaagacatgtacatgaagataccgttctaggcggctaccatgttcctgctggcacagaacttgccgttaacatctacggttgcaacatggacaaaaacgtttgggaaaatccagaggaatggaacccagaaagattcatgaaagagaatgagacaattgattttcaaaagacgatggccttcggtggtggtaagagagtttgtgctggttccttgcaagcccttttaactgcatctattgggattgggagaatggttcaagagttcgaatggaaactgaaggatatgactcaagaggaagtgaacacgataggcctaactacacaaatgttaagaccattgagagctattatcaaacctaggatctaa

SEQ ID NO: 172 - protein, 513 aa, Stevia rebaudiana
MDAVTGLLTVPATAITIGGTAVALAVALIFWYLKSYTSARRSQSNHLPRVPEVPGVPLLGNLLQLKEKKPYMTFTRWAATYGPIYSIKTGATSMVVVSSNEIAKEALVTRFQSISTRNLSKALKVLTADKTMVAMSDYDDYHKTVKRHILTAVLGPNAQKKHRIHRDIMMDNISTQLHEFVKNNPEQEEVDLRKIFQSELFGLAMRQALGKDVESLYVEDLKITMNRDEIFQVLVVDPMMGAIDVDWRDFFPYLKWVPNKKFENTIQQMYIRREAVMKSLIKEHKKRIASGEKLNSYIDYLLSEAQTLTDQQLLMSLWEPIIESSDTTMVTTEWAMYELAKNPKLQDRLYRDIKSVCGSEKITEEHLSQLPYITAIFHETLRRHSPVPIIPLRHVHEDTVLGGYHVPAGTELAVNIYGCNMDKNVWENPEEWNPERFMKENETIDFQKTMAFGGGKRVCAGSLQALLTASIGIGRMVQEFEWKLKDMTQEEVNTIGLTTQMLRPLRAIIKPRI

SEQ ID NO: 173 - DNA, 2142 bp, Gibberella fujikuroi; identical to SEQ ID NO: 47

SEQ ID NO: 174 - protein, 713 aa, Gibberella fujikuroi; identical to SEQ ID NO: 48

SEQ ID NO: 175 - DNA, 1059 bp, Saccharomyces cerevisiae
atggcttcagaaaaagaaattaggagagagagattcttgaacgttttccctaaattagtagaggaattgaacgcatcgcttttggcttacggtatgcctaaggaagcatgtgactggtatgcccactcattgaactacaacactccaggcggtaagctaaatagaggtttgtccgttgtggacacgtatgctattctctccaacaagaccgttgaacaattggggcaagaagaatacgaaaaggttgccattctaggttggtgcattgagttgttgcaggcttacttcttggtcgccgatgatatgatggacaagtccattaccagaagaggccaaccatgttggtacaaggttcctgaagttggggaaattgccatcaatgacgcattcatgttagaggctgctatctacaagcttttgaaatctcacttcagaaacgaaaaatactacatagatatcaccgaattgttccatgaggtcaccttccaaaccgaattgggccaattgatggacttaatcactgcacctgaagacaaagtcgacttgagtaagttctccctaaagaagcactccttcatagttactttcaagactgcttactattctttctacttgcctgtcgcattggccatgtacgttgccggtatcacggatgaaaaggatttgaaacaagccagagatgtcttgattccattgggtgaatacttccaaattcaagatgactacttagactgcttcggtaccccagaacagatcggtaagatcggtacagatatccaagataacaaatgttcttgggtaatcaacaaggcattggaacttgcttccgcagaacaaagaaagactttagacgaaaattacggtaagaaggactcagtcgcagaagccaaatgcaaaaagattttcaatgacttgaaaattgaacagctataccacgaatatgaagagtctattgccaaggatttgaaggccaaaatttctcaggtcgatgagtctcgtggcttcaaagctgatgtcttaactgcgttcttgaacaaagtttacaagagaagcaaatag

SEQ ID NO: 176 - protein, 352 aa, Saccharomyces cerevisiae
MASEKEIRRERFLNVFPKLVEELNASLLAYGMPKEACDWYAHSLNYNTPGGKLNRGLSVVDTYAILSNKTVEQLGQEEYEKVAILGWCIELLQAYFLVADDMMDKSITRRGQPCWYKVPEVGEIAINDAFMLEAAIYKLLKSHFRNEKYYIDITELFHEVTFQTELGQLMDLITAPEDKVDLSKFSLKKHSFIVTFKTAYYSFYLPVALAMYVAGITDEKDLKQARDVLIPLGEYFQIQDDYLDCFGTPEQIGKIGTDIQDNKCSWVINKALELASAEQRKTLDENYGKKDSVAEAKCKKIFNDLKIEQLYHEYEESIAKDLKAKISQVDESRGFKADVLTAFLNKVYKRSK

SEQ ID NO: 177 - DNA, 894 bp, Synecococcus sp.
atggtcgcacaaactttcaacctggatacctacttatcccaaagacaacaacaagttgaagaggccctaagtgctgctcttgtgccagcttatcctgagagaatatacgaagctatgagatactccctcctggcaggtggcaaaagattaagacctatcttatgtttagctgcttgcgaattggcaggtggttctgttgaacaagccatgccaactgcgtgtgcacttgaaatgatccatacaatgtcactaattcatgatgacctgccagccatggataacgatgatttcagaagaggaaagccaactaatcacaaggtgttcggggaagatatagccatcttagcgggtgatgcgcttttagcttacgcttttgaacatattgcttctcaaacaagaggagtaccacctcaattggtgctacaagttattgctagaatcggacacgccgttgctgcaacaggcctcgttggaggccaagtcgtagaccttgaatctgaaggtaaagctatttccttagaaacattggagtatattcactcacataagactggagccttgctggaagcatcagttgtctcaggcggtattctcgcaggggcagatgaagagcttttggccagattgtctcattacgctagagatataggcttggcttttcaaatcgtcgatgatatcctggatgttactgctacatctgaacagttggggaaaaccgctggtaaagaccaggcagccgcaaaggcaacttatccaagtctattgggtttagaagcctctagacagaaagcggaagagttgattcaatctgctaaggaagccttaagaccttacggttcacaagcagagccactcctagcgctggcagacttcatcacacgtcgtcagcattaa

SEQ ID NO: 178 - protein, 297 aa, Synecococcus sp.
MVAQTFNLDTYLSQRQQQVEEALSAALVPAYPERIYEAMRYSLLAGGKRLRPILCLAACELAGGSVEQAMPTACALEMIHTMSLIHDDLPAMDNDDFRRGKPTNHKVFGEDIAILAGDALLAYAFEHIASQTRGVPPQLVLQVIARIGHAVAATGLVGGQVVDLESEGKAISLETLEYIHSHKTGALLEASVVSGGILAGADEELLARLSHYARDIGLAFQIVDDILDVTATSEQLGKTAGKDQAAAKATYPSLLGLEASRQKAEELIQSAKEALRPYGSQAEPLLALADFITRRQH

SEQ ID NO: 179 - DNA, 2337 bp, Zea mays
atggcacagcacacatcagaatccgcagctgtcgcaaagggcagcagtttgacccctatagtgagaactgacgctgagtcaaggagaacaagatggccaaccgatgacgatgacgccgaacctttagtggatgagatcagggcaatgcttacttccatgtctgatggtgacatttccgtgagcgcatacgatacagcctgggtcggattggttccaagattagacggcggtgaaggtcctcaatttccagcagctgtgagatggataagaaataaccagttgcctgacggaagttggggcgatgccgcattattctctgcctatgacaggcttatcaatacccttgcctgcgttgtaactttgacaaggtggtccctagaaccagagatgagaggtagaggactatcttttttgggtaggaacatgtggaaattagcaactgaagatgaagagtcaatgcctattggcttcgaattagcatttccatctttgatagagcttgctaagagcctaggtgtccatgacttcccttatgatcaccaggccctacaaggaatctactcttcaagagagatcaaaatgaagaggattccaaaagaagtgatgcataccgttccaacatcaatattgcacagtttggagggtatgcctggcctagattgggctaaactacttaaactacagagcagcgacggaagttttttgttctcaccagctgccactgcatatgctttaatgaataccggagatgacaggtgttttagctacatcgatagaacagtaaagaaattcaacggcggcgtccctaatgtttatccagtggatctatttgaacatatttgggccgttgatagacttgaaagattaggaatctccaggtacttccaaaaggagatcgaacaatgcatggattatgtaaacaggcattggactgaggacggtatttgttgggcaaggaactctgatgtcaaagaggtggacgacacagctatggcctttagacttcttaggttgcacggctacagcgtcagtcctgatgtgtttaaaaacttcgaaaaggacggtgaatttttcgcatttgtcggacagtctaatcaagctgttaccggtatgtacaacttaaacagagcaagccagatatccttcccaggcgaggatgtgcttcatagagctggtgccttctcatatgagttcttgaggagaaaagaagcagagggagctttgagggacaagtggatcatttctaaagatctacctggtgaagttgtgtatactttggattttccatggtacggcaacttacctagagtcgaggccagagactacctagagcaatacggaggtggtgatgacgtttggattggcaagacattgtataggatgccacttgtaaacaatgatgtatatttggaattggcaagaatggatttcaaccactgccaggctttgcatcagttagagtggcaaggactaaaaagatggtatactgaaaataggttgatggactttggtgtcgcccaagaagatgcccttagagcttattttcttgcagccgcatctgtttacgagccttgtagagctgccgagaggcttgcatgggctagagccgcaatactagctaacgccgtgagcacccacttaagaaatagcccatcattcagagaaaggttagagcattctcttaggtgtagacctagtgaagagacagatggctcctggtttaactcctcaagtggctctgatgcagttttagtaaaggctgtcttaagacttactgattcattagccagggaagcacagccaatccatggaggtgacccagaagatattatacacaagttgttaagatctgcttgggccgagtgggttagggaaaaggcagacgctgccgatagcgtgtgcaatggtagttctgcagtagaacaagagggatcaagaatggtccatgataaacagacctgtctattattggctagaatgatcgaaatttctgccggtagggcagctggtgaagcagccagtgaggacggcgatagaagaataattcaattaacaggctccatctgcgacagtcttaagcaaaaaatgctagtttcacaggaccctgaaaaaaatgaagagatgatgtctcacgtggatgacgaattgaagttgaggattagagagttcgttcaatatttgcttagactaggtgaaaaaaagactggatctagcgaaaccaggcaaacatttttaagtatagtgaaatcatgttactatgctgctcattgcccacctcatgtcgttgatagacacattagtagagtgattttcgagccagtaagtgccgcaaagtaa

SEQ ID NO: 180 - protein, 778 aa, Zea mays
MAQHTSESAAVAKGSSLTPIVRTDAESRRTRWPTDDDDAEPLVDEIRAMLTSMSDGDISVSAYDTAWVGLVPRLDGGEGPQFPAAVRWIRNNQLPDGSWGDAALFSAYDRLINTLACVVTLTRWSLEPEMRGRGLSFLGRNMWKLATEDEESMPIGFELAFPSLIELAKSLGVHDFPYDHQALQGIYSSREIKMKRIPKEVMHTVPTSILHSLEGMPGLDWAKLLKLQSSDGSFLFSPAATAYALMNTGDDRCFSYIDRTVKKFNGGVPNVYPVDLFEHIWAVDRLERLGISRYFQKEIEQCMDYVNRHWTEDGICWARNSDVKEVDDTAMAFRLLRLHGYSVSPDVFKNFEKDGEFFAFVGQSNQAVTGMYNLNRASQISFPGEDVLHRAGAFSYEFLRRKEAEGALRDKWIISKDLPGEVVYTLDFPWYGNLPRVEARDYLEQYGGGDDVWIGKTLYRMPLVNNDVYLELARMDFNHCQALHQLEWQGLKRWYTENRLMDFGVAQEDALRAYFLAAASVYEPCRAAERLAWARAAILANAVSTHLRNSPSFRERLEHSLRCRPSEETDGSWFNSSSGSDAVLVKAVLRLTDSLAREAQPIHGGDPEDIIHKLLRSAWAEWVREKADAADSVCNGSSAVEQEGSRMVHDKQTCLLLARMIEISAGRAAGEAASEDGDRRIIQLTGSICDSLKQKMLVSQDPEKNEEMMSHVDDELKLRIREFVQYLLRLGEKKTGSSETRQTFLSIVKSCYYAAHCPPHVVDRHISRVIFEPVSAAK

SEQ ID NO: 181 - DNA, 2358 bp, Arabidopsis thaliana
atgtctattaatttgagatcttccggttgtagctccccaataagcgcaactttggaaaggggtctagactctgaagttcaaacaagagcaaacaatgtatcttttgagcagaccaaagagaagatcaggaaaatgcttgagaaggtcgagttgagcgtgagtgcctatgacactagttgggtagctatggtcccatcaccatccagtcaaaacgcacctcttttcccacagtgcgtcaaatggctacttgataatcaacatgaggacggctcttggggattggataaccacgaccatcagagcttaaagaaagatgtgttgtcatccacattagcctctatcctagctcttaagaaatggggaataggcgaaagacagatcaataagggtctacagttcattgaattaaactctgcactagttaccgatgaaactatacaaaaacctacaggtttcgacatcatttttccaggaatgattaagtacgccagggaccttaatttgaccatacctcttggctcagaagtagtcgacgatatgatcaggaaaagagatctagacttaaagtgtgatagcgagaaattcagcaaaggtagagaggcttatcttgcctatgttcttgaaggaactaggaacttgaaggactgggacttaattgtgaaatatcagagaaagaacggtagtctatttgatagtccagctacaaccgccgcagctttcactcaatttggcaatgacggttgcttgaggtacttatgttcacttttacagaaattcgaggccgcagtgcctagtgtatatccatttgatcaatacgctagattaagcataatcgtcactttagaatcattgggaattgacagagatttcaagactgagataaaaagcatattggatgagacctataggtactggcttagaggtgacgaagaaatttgcctagatttggccacatgtgcacttgcttttaggttgcttttagcccacggctatgacgtgtcatacgatcctctaaagccatttgcagaggaatctggtttcagcgatacccttgagggatatgttaaaaacaccttttccgtattagagcttttcaaggctgcccaaagttaccctcatgagagtgctttgaaaaagcagtgttgctggacaaaacaatatctagaaatggaactaagttcatgggttaaaacaagcgttagggacaagtacttgaaaaaggaagtggaggatgctttggcatttccatcatatgcctctttagaaagaagtgaccacagaaggaaaattcttaatggctcagcagttgaaaacacaagagtaaccaagacctcttacaggttgcataatatatgtacatcagatatcttaaaacttgctgtcgacgatttcaacttttgccaatctattcatagagaggaaatggaaagattggatagatggatagtggagaatagactacaggaattaaagttcgccagacaaaaattggcttactgttactttagtggcgctgccacactattctctccagaattgtctgacgcaaggatctcatgggctaagggaggtgttctaaccacagtagtcgatgacttttttgatgttggcggtagtaaagaagagcttgagaacttaattcacttggtggaaaagtgggatcttaatggagttcctgaatactcttcagagcatgtagaaataattttctctgtcctaagagacactatcttagaaaccggtgataaagcctttacatatcagggcagaaacgttactcaccatattgtgaaaatatggttggacttacttaagagcatgctaagggaggctgaatggtccagtgacaaatcaaccccatctttggaagattacatggagaatgcctatatcagcttcgcattaggtcctattgtattgccagctacataccttataggacctccactacctgaaaagactgtcgactcccaccaatataatcaattatacaaattggttagtaccatgggtagactattaaacgatatccagggctttaagagggaatcagccgagggaaaacttaatgcagtgtctctacatatgaagcatgaaagagacaacagaagcaaagaggttattatagaatccatgaaaggattggctgaaaggaaaagagaggaattacacaaacttgtactagaagagaaaggtagtgtcgttccaagagaatgcaaggaagccttcttaaaaatgtcaaaagtgttgaaccttttttataggaaggatgatggcttcacatctaacgacttgatgagccttgtgaaatccgtcatctacgagcctgtttcacttcaaaaggagagtctaacttga

SEQ ID NO: 182 - protein, 785 aa, Arabidopsis thaliana
MSINLRSSGCSSPISATLERGLDSEVQTRANNVSFEQTKEKIRKMLEKVELSVSAYDTSWVAMVPSPSSQNAPLFPQCVKWLLDNQHEDGSWGLDNHDHQSLKKDVLSSTLASILALKKWGIGERQINKGLQFIELNSALVTDETIQKPTGFDIIFPGMIKYARDLNLTIPLGSEVVDDMIRKRDLDLKCDSEKFSKGREAYLAYVLEGTRNLKDWDLIVKYQRKNGSLFDSPATTAAAFTQFGNDGCLRYLCSLLQKFEAAVPSVYPFDQYARLSIIVTLESLGIDRDFKTEIKSILDETYRYWLRGDEEICLDLATCALAFRLLLAHGYDVSYDPLKPFAEESGFSDTLEGYVKNTFSVLELFKAAQSYPHESALKKQCCWTKQYLEMELSSWVKTSVRDKYLKKEVEDALAFPSYASLERSDHRRKILNGSAVENTRVTKTSYRLHNICTSDILKLAVDDFNFCQSIHREEMERLDRWIVENRLQELKFARQKLAYCYFSGAATLFSPELSDARISWAKGGVLTTVVDDFFDVGGSKEELENLIHLVEKWDLNGVPEYSSEHVEIIFSVLRDTILETGDKAFTYQGRNVTHHIVKIWLDLLKSMLREAEWSSDKSTPSLEDYMENAYISFALGPIVLPATYLIGPPLPEKTVDSHQYNQLYKLVSTMGRLLNDIQGFKRESAEGKLNAVSLHMKHERDNRSKEVIIESMKGLAERKREELHKLVLEEKGSVVPRECKEAFLKMSKVLNLFYRKDDGFTSNDLMSLVKSVIYEPVSLQKESLT

SEQ ID NO: 183 - DNA, 1587 bp, Gibberella fujikuroi
atgatgagtaattttgttactttgattgagccattagaacttaccggttcaagggttctaagaatcgccgtggcgttcgcggctttgtgtggtgccaccggtttgctggccttttcctggtggatttataagcaaagctctagtaagccaacgcttccgtaccctgtagttggcgatacacatgcacaaagcttggaaaaaaatttaatcaaaggaatgcaacaatacagagacagtccatttttcctagccggaagcagacctccgttactaattttgcctatgtccgtttttcatgagatccataacatgcctaacgaatatatatctattatcgttgagcacgaagacaaattccaaggcaagtatacccatataactacaataagaccagaaattcctgcaacaataagacaagatttaacaaggaacatgccaaatatcatactagaattgcaagatgaactaacatacgcctcagaccaatggcctagaacatccaaatggtcttcagtttcactatatgacatgatgttgaggactgtagccctgctgtcaggtagagctttcgttggcttaccactatgtagagatgagggatggttgcaggcaagtataggttatacagtccaatgcgtttcaataagagatcagctttttacttggagccccgtattgagaccaattatcgggccattcttgccctcagttagaagtgtgaggagacacttgagatttgctgcagaaattatggctcctcttatcagtcaggctttacaagatgaaaagcaacacagggctgatacacttttagcagatcagaccgaaggtcgtggcacgtttatttcttggttactgagacacctgccagaagaattacgtactcctgagcaagtaggactggaccagatgcttgtatcttttgccgcaattcacactacaacaatggctctaaccaaagtcgtgtgggaattagttaagagaccagaatacatcgaacccttgagaactgaaatgcaagatgtcttcgggcccgatgcggtttcaccagacatttgcattaataaagaggccctatccaggttgcataaattggattcttttattagggaggttcaaagatggtgtccttccacttttgttactcctagccgtagagtgatgaagtccatgacgctgagcaacggaattaaactgcaacgtggtacgagtattgcttttcctgctcatgctatacatatgtcagaagaaacacctactttttcacctgacttttcttctgacttcgaaaatccttcccctagaatttttgatgggttccgttatttaaacttgaggtcaatcaagggacaaggaagccagcatcaagcggctactaccggtcctgattacttaatttttaaccatggtaaacatgcttgccctggtagattttttgctatttcagaaataaaaatgatcttgatagagttactagctaagtacgatttcaggttggaagacggaaaaccagggcctgaactaatgagagttggtactgagacaagattggatacaaaggcaggtttggagatgagacgtagataa

SEQ ID NO: 184 - protein, 528 aa, Gibberella fujikuroi
MMSNFVTLIEPLELTGSRVLRIAVAFAALCGATGLLAFSWWIYKQSSSKPTLPYPVVGDTHAQSLEKNLIKGMQQYRDSPFFLAGSRPPLLILPMSVFHEIHNMPNEYISIIVEHEDKFQGKYTHITTIRPEIPATIRQDLTRNMPNIILELQDELTYASDQWPRTSKWSSVSLYDMMLRTVALLSGRAFVGLPLCRDEGWLQASIGYTVQCVSIRDQLFTWSPVLRPIIGPFLPSVRSVRRHLRFAAEIMAPLISQALQDEKQHRADTLLADQTEGRGTFISWLLRHLPEELRTPEQVGLDQMLVSFAAIHTTTMALTKVVWELVKRPEYIEPLRTEMQDVFGPDAVSPDICINKEALSRLHKLDSFIREVQRWCPSTFVTPSRRVMKSMTLSNGIKLQRGTSIAFPAHAIHMSEETPTFSPDFSSDFENPSPRIFDGFRYLNLRSIKGQGSQHQAATTGPDYLIFNHGKHACPGRFFAISEIKMILIELLAKYDFRLEDGKPGPELMRVGTETRLDTKAGLEMRRR

SEQ ID NO: 185 - DNA, 1587 bp, Gibberella fujikuroi
atgatgtccaacttcgttaccttgatcgaaccattggaattgactggttctagagttttgagaattgctgttgcttttgctgctttgtgtggtgctactggtttgttggctttttcttggtggatctacaagcaatcttcttcaaaacctactttgccatacccagttgttggtgatactcatgctcaatctttggaaaagaacttgattaagggtatgcaacaatacagagactccccattctttttggctggttcaagaccaccattattgatcttgccaatgtctgttttccacgaaatccataacatgccaaacgaatatatctccatcatcgttgaacacgaagataagttccaaggtaaatacacccatatcactaccatcagaccagaaattccagctaccattagacaagatttgaccagaaacatgcctaacatcatcttggaattgcaagacgaattgacctacgcttctgatcaatggccaagaacttctaagtggtcctctgtttcattatacgacatgatgttgagaaccgttgctttgttgtctggtagagcttttgttggtttgccattgtgtagagatgaaggttggttgcaagcttctattggttacactgttcaatgcgtgtctatcagagatcagttgtttacttggtccccagttttgaggccaattattggtccatttttgccatccgttagatctgttagaaggcatttgagattcgctgctgaaattatggctccattgatttctcaagccttgcaagacgaaaaacaacatagagctgataccttgttggctgatcaaactgaaggtagaggtactttcatttcctggttgttgagacatttgccagaagaattgagaaccccagaacaagttggtttggatcaaatgttggtttcctttgctgctattcataccactactatggctttgacaaaggttgtttgggaattggtaaaaaggccagagtacattgaaccattgagaaccgaaatgcaagatgtttttggtccagatgctgtttctccagatatctgcattaacaaagaagccttgtccagattgcacaagttggattctttcatcagagaagttcaaagatggtgtccatctactttcgttactccatctagaagagtcatgaagtctatgactttgtccaacggtatcaagttgcaaagaggtacttctattgcttttccagctcatgccattcacatgtctgaagaaactccaacattttccccagatttctcttccgattttgaaaacccatccccaagaattttcgacggttttagatacttgaacttgaggtccattaagggtcaaggttcacaacatcaagctgctactactggtccagattacttgattttcaatcatggtaaacatgcctgcccaggtagattttttgctatctctgaaatcaagatgattttgatcgagttgttggccaagtacgacttcagattggaagatggtaaaccaggtccagaattgatgagagttggtactgaaactagattggataccaaagctggtttggaaatgagaagaaggtga

SEQ ID NO: 186 - protein, 528 aa, Gibberella fujikuroi; identical to SEQ ID NO: 184

SEQ ID NO: 187 - DNA, 2157 bp, Ustilaginoidea virens; identical to SEQ ID NO: 11

SEQ ID NO: 188 - protein, 718 aa, Ustilaginoidea virens; identical to SEQ ID NO: 12

SEQ ID NO: 189 - DNA, 2079 bp, Ustilaginoidea virens
atggcggaattagatacgttagatatcgttgttttaggcgctttattgttgggcacattagcgtattttacgaagggcacattatggggtgtcactaaggatccttatgcaaacgctttcgcaaatgctaacggagctaaagccggcagatcaagaaatatcgttgaaaaaatggatgaatctggtaaaaactgcgtcatattctacggttctcaaactggaacggcagaggattacgcatcaagattagcgaaagaaggaaagtcaagattcgggttagggactatggttgcagatttagaagaatatgattatgataaccttgatacaatgagcggcgataaggttgccatgtttgttcttgctacctatggcgagggcgaaccaactgacaacgcagtagagttttatgaatttattactggtgaaggggttgcttttagtgaaggaaacgatccccccttaggcaatctgaactacgtggcctttggactggggaacaatacttatgaacactacaattcaatggtcagaaatgtcgataaagcccttaggaatctgggtgctcataggatcggagaggctggtgaaggcgatgacggtgctggcacaatggaagaagattttctagcatggaaggaaccaatgtgggccgccttagctgacaaaatgggtttggaggaaagggaagcagtatatgaccctgtgttcagtatcgttgatcgtgataatttgactcctgaaagcccagaagtctatttgggtgaacctaataaaatgcatttagaggatgcggtcaagggcccatttaattctcataatccatatatagcaccaatagctgaatctagagaattgtttagtgttaaagacaggaattgcatccatatggaaattgacatagacggttcaaatttgagctatcaaactggggatcatgtggctatttggcctaccaacccaggagatgaagtggatagatttttagacatcattgatttaaaggataaacgtgacaaggttataggagtgaaagcacttgaaccaactgcaaaggtcccttttccaacaccaacaacatatgacgttatcgccaggtatcatttagaaatctgtgcaccggtctctagacagtttgtgtccactctagcagcattctccccaaatgatgaggtaaaagcagaaatgactagattgggtaacgataaggattattttcatgataagacgggcccacattattataatatcgcccgttttctagctgcggttggtaagggcgagaaatggtcaaatatccctttttctgtttttgtcgaaggtttaacgaaattacaaccaagatattattcaatctcctcttcaagcctagtacaaccaaaaaaaatatcaataacggcagtaattgagtcacaggttatacctgccaggcaagatccatttagaggtgtagctacgaactacttatttgcattgaaacagaagcaaaacggtgatccaaatccctccccatttggacatacttatgcattaaacggccctagaaataaatttgacggtatacacgtccccgtccacgtaaggcactccaatttcaaactaccgagcgatccagcaaaaccagttattatggttggtccaggaactggagtggctccgtttagaggtttcatccaagagagagctaaacaggcccaggatggggccacagtaggccgtactatcttgttcttcggttgccaacgtaggtccgaagattttttgtacgaaagtgaatggaaagaatacaaggaagttctaggagatacccttgagatagtcactgccttctccagggaaacatcaaagaaagtttatgtgcagcacaggttgaaagagagatccaaagaaatcggagaactattatcacagaaagcatacttttatgtgtgtggcgatgctgctcatatggctagagaagttaatactgtattggctcaaattatcgctgaatctaggggtgtaagtgaagccaagggtgaagagattgttaaaaatatgagggctgctaatcagtaccaagaagatgtgtggagctga

SEQ ID NO: 190 - protein, 692 aa, Ustilaginoidea virens
MAELDTLDIVVLGALLLGTLAYFTKGTLWGVTKDPYANAFANANGAKAGRSRNIVEKMDESGKNCVIFYGSQTGTAEDYASRLAKEGKSRFGLGTMVADLEEYDYDNLDTMSGDKVAMFVLATYGEGEPTDNAVEFYEFITGEGVAFSEGNDPPLGNLNYVAFGLGNNTYEHYNSMVRNVDKALRNLGAHRIGEAGEGDDGAGTMEEDFLAWKEPMWAALADKMGLEEREAVYDPVFSIVDRDNLTPESPEVYLGEPNKMHLEDAVKGPFNSHNPYIAPIAESRELFSVKDRNCIHMEIDIDGSNLSYQTGDHVAIWPTNPGDEVDRFLDIIDLKDKRDKVIGVKALEPTAKVPFPTPTTYDVIARYHLEICAPVSRQFVSTLAAFSPNDEVKAEMTRLGNDKDYFHDKTGPHYYNIARFLAAVGKGEKWSNIPFSVFVEGLTKLQPRYYSISSSSLVQPKKISITAVIESQVIPARQDPFRGVATNYLFALKQKQNGDPNPSPFGHTYALNGPRNKFDGIHVPVHVRHSNFKLPSDPAKPVIMVGPGTGVAPFRGFIQERAKQAQDGATVGRTILFFGCQRRSEDFLYESEWKEYKEVLGDTLEIVTAFSRETSKKVYVQHRLKERSKEIGELLSQKAYFYVCGDAAHMAREVNTVLAQIIAESRGVSEAKGEEIVKNMRAANQYQEDVWS

SEQ ID NO: 191 - DNA, 2079 bp, Gibberella fujikuroi
atggccgaattggataccttggatatcgttgttttgggtgttatcttcttgggtactgttgcttacttcaccaaaggtaaattgtggggtgttactaaggatccatacgctaatggttttgctgctggtggtgcttctaaaccaggtagaactagaaatatcgttgaagccatggaagaatctggtaagaactgtgttgttttctacggttctcaaactggtactgctgaagattatgcttccagattggctaaagaaggtaagagtagattcggtttgaacaccatgattgccgatttggaagattacgatttcgataacttggataccgtcccatctgataacatcgttatgtttgttttggctacctacggtgaaggtgaacctactgataatgctgttgacttctacgaattcattaccggtgaagatgcttctttcaacgaaggtaatgatccaccattgggtaacttgaattacgttgcttttggtttgggtaacaacacctacgaacattacaactccatggttagaaacgtcaacaaggctttggaaaaattgggtgctcatagaattggtgaagctggtgaaggtgatgatggtgctggtactatggaagaagattttttggcttggaaagacccaatgtgggaagccttggctaaaaagatgggtttggaagaaagagaagctgtctacgaacctattttcgccattaacgaaagagatgatttgacccctgaagccaatgaagtttatttgggtgaacctaacaagttgcacttggaaggtactgctaaaggtccattcaattctcacaacccatatattgctccaatcgccgaatcttacgaattattctctgctaaggatagaaactgcttgcacatggaaattgacatctctggttctaatttgaagtacgaaaccggtgatcatattgccatttggccaactaatccaggtgaagaagttaacaagttcttggacatcttggacttgtccggtaaacaacattctgttgttactgttaaggccttggaacctacagctaaagttccttttccaaatccaactacctacgatgccattttgagataccatttggaaatttgcgctccagtctctagacaattcgtttctactttggctgcttttgctccaaacgatgatattaaggctgaaatgaacagattgggttccgataaggattacttccacgaaaaaactggtccacactactacaacattgctagatttttggcctctgtctctaaaggtgaaaagtggactaagattccattctccgctttcattgaaggtttgactaagttgcaacctagatattactccatctcctcctcatctttggttcaacctaagaagatctctattaccgccgttgttgaatcccaacaaattccaggtagagatgatccttttagaggtgttgctaccaattacttgttcgccttgaaacaaaagcaaaacggtgatccaaatcctgctccatttggtcaatcttatgaattgactggtccaagaaacaagtacgatggtattcatgttccagttcacgttagacactctaactttaagttgccatctgatccaggtaagccaattatcatgattggtccaggtactggtgttgctccattcagaggttttgttcaagaaagagctaagcaagctagagatggtgttgaagttggtaaaaccttgttgttcttcggttgtagaaagtccactgaagatttcatgtaccaaaaagaatggcaagaatacaaagaagccttaggtgacaagttcgaaatgattactgccttctcaagagaaggttctaagaaggtttacgtccaacacagattgaaagaaagatccaaagaagtctccgatttgttgtctcaaaaggcctacttttacgtttgtggtgatgctgctcatatggccagagaagttaatactgttttggcccaaattatcgctgaaggtagaggtgtatctgaagctaagggtgaagaaatcgttaagaacatgagatccgccaatcaataccaagaagatgtttggtcctaa

SEQ ID NO: 192 - protein, 692 aa, Gibberella fujikuroi
MAELDTLDIVVLGVIFLGTVAYFTKGKLWGVTKDPYANGFAAGGASKPGRTRNIVEAMEESGKNCVVFYGSQTGTAEDYASRLAKEGKSRFGLNTMIADLEDYDFDNLDTVPSDNIVMFVLATYGEGEPTDNAVDFYEFITGEDASFNEGNDPPLGNLNYVAFGLGNNTYEHYNSMVRNVNKALEKLGAHRIGEAGEGDDGAGTMEEDFLAWKDPMWEALAKKMGLEEREAVYEPIFAINERDDLTPEANEVYLGEPNKLHLEGTAKGPFNSHNPYIAPIAESYELFSAKDRNCLHMEIDISGSNLKYETGDHIAIWPTNPGEEVNKFLDILDLSGKQHSVVTVKALEPTAKVPFPNPTTYDAILRYHLEICAPVSRQFVSTLAAFAPNDDIKAEMNRLGSDKDYFHEKTGPHYYNIARFLASVSKGEKWTKIPFSAFIEGLTKLQPRYYSISSSSLVQPKKISITAVVESQQIPGRDDPFRGVATNYLFALKQKQNGDPNPAPFGQSYELTGPRNKYDGIHVPVHVRHSNFKLPSDPGKPIIMIGPGTGVAPFRGFVQERAKQARDGVEVGKTLLFFGCRKSTEDFMYQKEWQEYKEALGDKFEMITAFSREGSKKVYVQHRLKERSKEVSDLLSQKAYFYVCGDAAHMAREVNTVLAQIIAEGRGVSEAKGEEIVKNMRSANQYQEDVWS

SEQ ID NO: 193 - DNA, 2079 bp, Gibberella fujikuroi
atggcagaattagatacacttgatatagtagtattaggtgttatctttttgggtactgtggcatactttactaagggtaaattgtggggtgttaccaaggatccatacgctaacggattcgctgcaggtggtgcttccaagcctggcagaactagaaacatcgtcgaagctatggaggaatcaggtaaaaactgtgttgttttctacggcagtcaaacaggtacagcggaggattacgcatcaagacttgcaaaggaaggaaagtccagattcggtttgaacactatgatcgccgatctagaagattatgacttcgataacttagacactgttccatctgataacatcgttatgtttgtattggctacttacggtgaaggcgaaccaacagataacgccgtggatttctatgagttcattactggcgaagatgcctctttcaatgagggcaacgatcctccactaggtaacttgaattacgttgcgttcggtctgggcaacaatacctacgaacactacaactcaatggtcaggaacgttaacaaggctctagaaaagttaggagctcatagaattggagaagcaggtgagggtgacgacggagctggaactatggaagaggactttttagcttggaaagatccaatgtgggaagccttggctaaaaagatgggcttggaggaaagagaagctgtatatgaacctattttcgctatcaatgagagagatgatttgacccctgaagcgaatgaggtatacttgggagaacctaataagctacacttggaaggtacagcgaaaggtccattcaactcccacaacccatatatcgcaccaattgcagaatcatacgaacttttctcagctaaggatagaaattgtctgcatatggaaattgatatttctggtagtaatctaaagtatgaaacaggcgaccatatcgcgatctggcctaccaacccaggtgaagaggtcaacaaatttcttgacattctagatctgtctggtaagcaacattccgtcgtaacagtgaaagccttagaacctacagccaaagttccttttccaaatccaactacctacgatgctatattgagataccatctggaaatatgcgctccagtttctagacagtttgtctcaactttagcagcattcgcccctaatgatgatatcaaagctgagatgaaccgtttgggatcagacaaagattacttccacgaaaagacaggaccacattactacaatatcgctagatttttggcctcagtctctaaaggtgaaaaatggacaaagataccattttctgctttcatagaaggccttacaaaactacaaccaagatactattctatctcttcctctagtttagttcagcctaaaaagattagtattactgctgttgtcgaatctcagcaaattccaggtagagatgacccattcagaggtgtagcgactaactacttgttcgctttgaagcagaaacaaaacggtgatccaaatccagctccttttggccaatcatacgagttgacaggaccaaggaataagtatgatggtatacatgttccagtccatgtaagacattctaactttaagctaccatctgatccaggcaaacctattatcatgatcggtccaggtaccggtgttgccccttttagaggcttcgtccaagagagggcaaaacaagccagagatggtgtagaagttggtaaaacactgctgttctttggatgtagaaagagtacagaagatttcatgtatcaaaaagagtggcaagagtacaaggaagctcttggcgacaaattcgaaatgattacagctttttcaagagaaggatctaaaaaggtttatgttcaacacagactgaaggaaagatcaaaggaagtttctgatcttctatcccaaaaagcatacttctacgtttgcggagacgccgcacatatggcacgtgaagtgaacactgtgttagcacagatcatagcagaaggccgtggtgtatcagaagccaagggtgaggaaattgtcaaaaacatgagatcagcaaatcaataccaagaggatgtctggagttaa

SEQ ID NO: 194 - protein, 692 aa, Gibberella fujikuroi; identical to SEQ ID NO: 192

SEQ ID NO: 195 - DNA, 1986 bp, Artificial Sequence
  Codon-optimized nucleotide sequence
atggcttcagaaaaagaaattaggagagagagattcttgaacgttttccctaaattagtagaggaattgaacgcatcgcttttggcttacggtatgcctaaggaagcatgtgactggtatgcccactcattgaactacaacactccaggcggtaagctaaatagaggtttgtccgttgtggacacgtatgctattctctccaacaagaccgttgaacaattggggcaagaagaatacgaaaaggttgccattctaggttggtgcattgagttgttgcaggcttacttcttggtcgccgatgatatgatggacaagtccattaccagaagaggccaaccatgttggtacaaggttcctgaagttggggaaattgccatcaatgacgcattcatgttagaggctgctatctacaagcttttgaaatctcacttcagaaacgaaaaatactacatagatatcaccgaattgttccatgaggtcaccttccaaaccgaattgggccaattgatggacttaatcactgcacctgaagacaaagtcgacttgagtaagttctccctaaagaagcactccttcatagttactttcaagactgcttactattctttctacttgcctgtcgcattggccatgtacgttgccggtatcacggatgaaaaggatttgaaacaagccagagatgtcttgattccattgggtgaatacttccaaattcaagatgactacttagactgcttcggtaccccagaacagatcggtaagatcggtacagatatccaagataacaaatgttcttgggtaatcaacaaggcattggaacttgcttccgcagaacaaagaaagactttagacgaaaattacggtaagaaggactcagtcgcagaagccaaatgcaaaaagattttcaatgacttgaaaattgaacagctataccacgaatatgaagagtctattgccaaggatttgaaggccaaaatttctcaggtcgatgagtctcgtggcttcaaagctgatgtcttaactgcgttcttgaacaaagtttacaagagaagcaaaggttctagtactggttcatctacatctactggaggtatggtcgcacaaactttcaacctggatacctacttatcccaaagacaacaacaagttgaagaggccctaagtgctgctcttgtgccagcttatcctgagagaatatacgaagctatgagatactccctcctggcaggtggcaaaagattaagacctatcttatgtttagctgcttgcgaattggcaggtggttctgttgaacaagccatgccaactgcgtgtgcacttgaaatgatccatacaatgtcactaattcatgatgacctgccagccatggataacgatgatttcagaagaggaaagccaactaatcacaaggtgttcggggaagatatagccatcttagcgggtgatgcgcttttagcttacgcttttgaacatattgcttctcaaacaagaggagtaccacctcaattggtgctacaagttattgctagaatcggacacgccgttgctgcaacaggcctcgttggaggccaagtcgtagaccttgaatctgaaggtaaagctatttccttagaaacattggagtatattcactcacataagactggagccttgctggaagcatcagttgtctcaggcggtattctcgcaggggcagatgaagagcttttggccagattgtctcattacgctagagatataggcttggcttttcaaatcgtcgatgatatcctggatgttactgctacatctgaacagttggggaaaaccgctggtaaagaccaggcagccgcaaaggcaacttatccaagtctattgggtttagaagcctctagacagaaagcggaagagttgattcaatctgctaaggaagccttaagaccttacggttcacaagcagagccactcctagcgctggcagacttcatcacacgtcgtcagcattaa

SEQ ID NO: 196 - protein, 661 aa, Artificial Sequence
  Codon-optimized nucleotide sequence
MASEKEIRRERFLNVFPKLVEELNASLLAYGMPKEACDWYAHSLNYNTPGGKLNRGLSVVDTYAILSNKTVEQLGQEEYEKVAILGWCIELLQAYFLVADDMMDKSITRRGQPCWYKVPEVGEIAINDAFMLEAAIYKLLKSHFRNEKYYIDITELFHEVTFQTELGQLMDLITAPEDKVDLSKFSLKKHSFIVTFKTAYYSFYLPVALAMYVAGITDEKDLKQARDVLIPLGEYFQIQDDYLDCFGTPEQIGKIGTDIQDNKCSWVINKALELASAEQRKTLDENYGKKDSVAEAKCKKIFNDLKIEQLYHEYEESIAKDLKAKISQVDESRGFKADVLTAFLNKVYKRSKGSSTGSSTSTGGMVAQTFNLDTYLSQRQQQVEEALSAALVPAYPERIYEAMRYSLLAGGKRLRPILCLAACELAGGSVEQAMPTACALEMIHTMSLIHDDLPAMDNDDFRRGKPTNHKVFGEDIAILAGDALLAYAFEHIASQTRGVPPQLVLQVIARIGHAVAATGLVGGQVVDLESEGKAISLETLEYIHSHKTGALLEASVVSGGILAGADEELLARLSHYARDIGLAFQIVDDILDVTATSEQLGKTAGKDQAAAKATYPSLLGLEASRQKAEELIQSAKEALRPYGSQAEPLLALADFITRRQH

SEQ ID NO: 197 - DNA, 336 bp, Escherichia coli
atgccaaagattgttattttgcctcatcaggatctctgccctgatggcgctgttctggaagctaatagcggtgaaaccattctcgacgcagctctgcgtaacggtatcgagattgaacacgcctgtgaaaaatcctgtgcttgcaccacctgccactgcatcgttcgtgaaggttttgactcactgccggaaagctcagagcaggaagacgacatgctggacaaagcctggggactggagccggaaagccgtttaagctgccaggcgcgcgttaccgacgaagatttagtagtcgaaatcccgcgttacactatcaaccatgcgcgtgagcattaa

SEQ ID NO: 198 - protein, 111 aa, Escherichia coli
MPKIVILPHQDLCPDGAVLEANSGETILDAALRNGIEIEHACEKSCACTTCHCIVREGFDSLPESSEQEDDMLDKAWGLEPESRLSCQARVTDEDLVVEIPRYTINHAREH

SEQ ID NO: 199 - DNA, 747 bp, Escherichia coli
atggctgattgggtaacaggcaaagtcactaaagtgcagaactggaccgacgccctgtttagtctcaccgttcacgcccccgtgcttccgtttaccgccgggcaatttaccaagcttggccttgaaatcgacggcgaacgcgtccagcgcgcctactcctatgtaaactcgcccgataatcccgatctggagttttacctggtcaccgtccccgatggcaaattaagcccacgactggcggcactgaaaccaggcgatgaagtgcaggtggttagcgaagcggcaggattctttgtgctcgatgaagtgccgcactgcgaaacgctatggatgctggcaaccggtacagcgattggcccttatttatcgattctgcaactaggtaaagatttagatcgcttcaaaaatctggtcctggtgcacgccgcacgttatgccgccgacttaagctatttgccactgatgcaggaactggaaaaacgctacgaaggaaaactgcgcattcagacggtggtcagtcgggaaacggcagcggggtcgctcaccggacggataccggcattaattgaaagtggggaactggaaagcacgattggcctgccgatgaataaagaaaccagccatgtgatgctgtgcggcaatccacagatggtgcgcgatacacaacagttgctgaaagagacccggcagatgacgaaacatttacgtcgccgaccgggccatatgacagcggagcattactggtaa

SEQ ID NO: 200 - protein, 248 aa, Escherichia coli
MADWVTGKVTKVQNWTDALFSLTVHAPVLPFTAGQFTKLGLEIDGERVQRAYSYVNSPDNPDLEFYLVTVPDGKLSPRLAALKPGDEVQVVSEAAGFFVLDEVPHCETLWMLATGTAIGPYLSILQLGKDLDRFKNLVLVHAARYAADLSYLPLMQELEKRYEGKLRIQTVVSRETAAGSLTGRIPALIESGELESTIGLPMNKETSHVMLCGNPQMVRDTQQLLKETRQMTKHLRRRPGHMTAEHYW

SEQ ID NO: 201 - DNA, 1449 bp, Artificial Sequence
  Codon-optimized nucleotide sequence
atgtccttcccagatgaacaaaaggttgatttccaaaccttccagaacgttatcaacaatcaattgtctccaacctccgaatccagacatggtatttgtccatctactgaagaatccttgtgggaatctccagtttctactcaagatgatgttgatagagctgtttctgctgctaaagctgcttatccagcttggagaaaattgtcttgggacgaaagagcttcttacttggttaagtttgctgatgctattgaagcccacaagcaagaattcattgatttgttgggtagagaagctggtaaaccaccacaagctggtggttttgaattgatgttggttatggaacacgttagggaaactccaaagttgagaattggtgaagttaagccagaagataacgaagatagaaccgctgttgttagatacgttccaattggtgttggtgttggtatagttccatggaattttccaatgttgttgggtattggtaaagcttacccagctatgttggctggtaatacttttatttggaagccatctccatacaccccatactctgctttgaaattggctgaaattggtgctaaagttttgccaccaggtgttttacaagctttgtctggtggtgatgatttgggtccaatgttgactgctcatccagatgttgccaaagtttcttttactggttctactgaaaccggtaaaaagattatggctgcttgtgctgctactttgaagagagttactttggaattgggtggtaatgatgctgctatcgtttgtgaagatgttgatattccaggtgttgctggtaaggttgcttttttggcttatgttcattctggtcagatctgcatgaacatcaagagaatctacgttcacgaatccatctacgacaagttcgtttccgaagttatcaagttcttgcatgctttgaaaaccggtgatttctctgatccagaagctttttttggtccaatccaaaacaagatgcagtacgaaaaattgcagaggttgtacgaacaaatcgataagcaaggttggaagtgtgcttttggttctgcttctccagctacttctgaaaaaggttattttgttccaccagtcttggttgataatccaccagaagattctgaaatcgtccaaatggaaccatttggtccaatagttccagttatgaagtggcaatctgaagatgatgttattgctagagctaacgcttctgattatggtttgggtgcttctgtttggtctaaagatgttgctagagcaagaagaatggctgaattattggaagctggttctgtttgggttaacacccattttgaagttgctccaaatgttccttttggtggtcataagcaatctggtattggtatggattggggtgaagttggtttgaaaggttggtgtaatccacaagcttattgggtcaaacattccggttaa

SEQ ID NO: 202 - protein, 482 aa, Artificial Sequence; identical to SEQ ID NO: 114
  Codon-optimzied nucleotide sequence

SEQ ID NO: 203-204 - skipped (2 entries)

SEQ ID NO: 205 - DNA, 1299 bp, Gibberella fujikuroi
atgtggtggctgtttcgtgccttgttttcatcaattttcctgctttcaatcgttttaagtattcctgttgcttttgatgttggtgggagagattcaggacttgcctatagtttagctttgttcttattctacttcatctactctagtttagaacttcttacgcctgaaaagtccagaagtcgttatttcttatctggcttcttaagattgagccaatggattatcatacctgcactattaatttgggcgttaggtcagttcgcggttgacgcagataacaccaattgggttgaacgtaccgttggaggtctgttcaattccaaatccacctcttggagagaatggatgtttggcaaggatggactggtggaaactatcactttaggcggctgggataacttgttacgttattctggtccagtgttccaattattagagggattttgtacacttcttgtaatccaagctgccggacaattaaccagatggcttgtaaatagaggtcgttcagatacatggctaattgtattgttagtgttaagctcaagtatcatggcatcagctgtgtattttctttggcgtgttgcacagtttccccagatcgggaatctagacgcaacgttaataggtattgcgatgacaaccgcagtatttttgtgtgcgttcggcatcggttctggcaggggtaatcccattgaatcatcattgttgttcgcttacattgtcttgtgtatttaccaaatttttacagactatctaccatcagaaaatgcagaccacacgcaagatcatgatggctcagaaagcgatatccctcctcttcctcctgttatcatggctagctacagcacgttccttcatatgttgggctctttgccctctgccgttcattcatcattggcacttttgtatgctgccttccagactataactccatccgtaattatttcactaacctataggagtcttgttttttactgcgccactaggattatacctagcattagagaaagtggtgcacaggctatgatgcaagaaccagactgggaagatagcgaaacagcttctaaatttttgggctttttgagctggttttccccctctatcttgatagctgtgtatacctccttattacttcaacatttttctacgagtgatggtcctgatggttggacgttgagaggcggagatgttgagggttctaattggcaatgggccaacataggtcttaccatggttttgtacggagtcgaactgtacctgggctctgatgagcatgatcattggaaggtggattaa

SEQ ID NO: 206 - protein, 432 aa, Gibberella fujikuroi
MWWLFRALFSSIFLLSIVLSIPVAFDVGGRDSGLAYSLALFLFYFIYSSLELLTPEKSRSRYFLSGFLRLSQWIIIPALLIWALGQFAVDADNTNWVERTVGGLFNSKSTSWREWMFGKDGLVETITLGGWDNLLRYSGPVFQLLEGFCTLLVIQAAGQLTRWLVNRGRSDTWLIVLLVLSSSIMASAVYFLWRVAQFPQIGNLDATLIGIAMTTAVFLCAFGIGSGRGNPIESSLLFAYIVLCIYQIFTDYLPSENADHTQDHDGSESDIPPLPPVIMASYSTFLHMLGSLPSAVHSSLALLYAAFQTITPSVIISLTYRSLVFYCATRIIPSIRESGAQAMMQEPDWEDSETASKFLGFLSWFSPSILIAVYTSLLLQHFSTSDGPDGWTLRGGDVEGSNWQWANIGLTMVLYGVELYLGSDEHDHWKVD

SEQ ID NO: 207 - DNA, 1065 bp, Gibberella fujikuroi
atggctgattctacattagctgctaacggtaacagtttattggaaactacaaaaacaaatgcggcagctgcctaccaaagcgttgcgaacggacccgttgcacagaatgtatacgatcacacgcaaaaggcatccaatgagttgtctaatctagcagctgcaaggagaactccggctaatccagccgctacaggtcaaccattgacgcattatcattcttttttcagtgaattactgagttggaataacccaagagcttctgccatagcttacgttacaattattggtgccatttttacggctagatatcttgatttgttgagatggggattgaaagtttcttggatggttttgggtgttactattcttgccgaggtattgggcaaggtaattctaaacaatggactggccacccaagtcagacctaggaggtattatacagtacctagagaaacactagatgctctaatcggcgatgttcatgaactaattaattttttcgtcatcgaagcacaacgtatcatttttgcagaaaacgtctttgcaagtgcggctgcctttattgctgcttttatatcttattttttggtgaaattagttccctactggggactagcagttattggtaccactgttgccttcgttgtcccattaatatacacctcaaatcaagaattgatcgacgaacaactacaccatgctagtgaactaataaatagccaaacagcgcaaatacaatccgttgcatctaaacaaatggaacaagtttccaatatctccaaacaatatgcaggagattatagtggtaaagtgcaagacctgttaagaggaaagacgcctagcaggcagaagatagacaagcccgagcaaccaattagcgctaaacaaccccaattccccagtccaccaaccgaggatccggtgacagcaacggaagctcctcaaatacctacccccgctgcgcttaaggaagagcttaatgctccaaccgcaatcgatactgctgcacctgaattaccccatgaggatgttgtgccctcaaaagaacctatgttagcctcctaa

SEQ ID NO: 208 - protein, 354 aa, Gibberella fujikuroi
MADSTLAANGNSLLETTKTNAAAAYQSVANGPVAQNVYDHTQKASNELSNLAAARRTPANPAATGQPLTHYHSFFSELLSWNNPRASAIAYVTIIGAIFTARYLDLLRWGLKVSWMVLGVTILAEVLGKVILNNGLATQVRPRRYYTVPRETLDALIGDVHELINFFVIEAQRIIFAENVFASAAAFIAAFISYFLVKLVPYWGLAVIGTTVAFVVPLIYTSNQELIDEQLHHASELINSQTAQIQSVASKQMEQVSNISKQYAGDYSGKVQDLLRGKTPSRQKIDKPEQPISAKQPQFPSPPTEDPVTATEAPQIPTPAALKEELNAPTAIDTAAPELPHEDVVPSKEPMLAS

SEQ ID NO: 209 - protein, 671 aa, Gibberella fujikuroi
MTERELHADVRRFYQHTSQTLTGLRPYPTEREVQDAAAAWQQKDNIENAIREAVRKGSPDSGGTTDTVIPLSAAEKRALINEIDHSFSENGMWMVIFTVSLSAFLQGFVQSSQNGANLFADQWLKSQKHTVNSQFAYANAAVYFSAAVIGCPLAAPMSSLFGRRGVIIVASFLIFAASVGSACITLNDNAWLSLRSIRLIGGVGMGLKATSTPILAAETAVGSWRGSSVLLWQLWVSFGIMMSFIVNICLNQIDDKNLKLRLILASPAVFALMLMYTVAKCPESFRYYLMPGSRKYSPEKAYASLLRLRNTKVGHNTSTHPFWLTPSFPFTTCTVEQHLIQAVTATSSQRLVLDAAPKPRTLVVGAVSHYVRQYWKILKVHRLRNAAITTGIVALSQQLSGINLMAFYGGTTLVGISPGNQPTEDQISKAMLYNLIFGLSNFLFCLPAIHSIDVLGRRRVLLFTIPGMALTLMAAAISFNTANEDVRNGLVAFWIYFHTVFYSPGMGPVPFVLASESFPLAFRDTGASLAISINLLFAGLLAWLQPLLVTGIRFGGTLGVFAGLNVVAFALIFLLMEETSGVPLESLGSVFDQSKKDLIHFQLFKFLPWFGRFILGRSSLAERPERTVDLSPSSVTAASVTDDDDEERIWNSDTVSSGVRLADMLGGNGRG

SEQ ID NO: 210 - protein, 620 aa, Gibberella fujikuroi
MSSPLDAAGLAIATTELCRNLATGLYFIIREIRDASKDAEIMQDTLAALHTRLDQVRALFDANVPQSPLEKDYRNSIDRTLENIHRDLSLLTSKLHIDVILEAKGSKRLEAWYVLQRKFQSDDIRNIKQRLAGSEELLQSHFEMLSIYISYRTRDEVTDFKAFVRPILEKLLFHATLTEERQRYQAAESRSIKRLQHVTNALGTGNTFPGEESDFEYHDAFKTWKDKSEAMIMSIADPPWHQVSNSNYVPSIRNESRDGASILPTVRDFREKNGMYPSLRVTPNLSHVEEILDESLHQDVTEDLINWCKEQGFPVNVSNFRYDLIWEAAPVALKGTSPMHQAIKTNNMVVLEKMLSRDCNIEVRLEDGSQDPTPLLLAGSELNAVAVKLLLTKGAKADATDRTGKTGLHLCQSPKFEGRRVAKLLLGDSRAEALDVNAQDQFGMTAAHIAARVGDVKMLEYLLLDQYGKKVADANAQQQDGSTPLMVALKSNIANKKQVIDVLSRCSDLSIKNKNGEDAKEVAAKHSPKDVRKYLLAHLDQDSTRSRRISESTTVVSGISVQMREESCSGCRRHCPQFTDCKLSIGDSAFSQDWKRSLRKYSSDQSSIAMGSSSSIRQAR

SEQ ID NO: 211 - protein, 501 aa, Gibberella fujikuroi
MSGRESIAAAPLPEPEPYSVFDKRQTALIVTIVSIAATFSGFASNIYFPALPTIAKDLNVSIELINLTVTSYLIFQGLAPSLWGPISDVKGRRVAYLLTFIVFLGACIGLAEAKNYATMVVLRCVQSTGSASTIAIGSGVIGDITTRDNRGGLMGIFQAGLLVPVAVGPIIGGALAGSLGWRSIFWFLTIYSGVFLIFLVLLLPETLRSIVGNGSREPKHVMAKYPLRVYQKTTKVKWIHDATSPSPTEKKRIDITGPFRILISKQAAPIIVFLAVYYAVWQMSITAMSSLFKDKYGLTETEIGLTFIANGVGSMVGTLITGKILNMDYRRFKARHDARIASGSKENDVETVNTRKNQENDFPLETARLRLVPVFSLLQCASILLFGWTIQYPKQVHIAVPIISTFITGWSAVSMQSVVMTYLVDVFHDRSAAASASLNLARCLFAAGGTSFVMPLINSIGVGLAFTVCVVVQGVALVSLAVQWKLGAKWRREAEDARSEP

SEQ ID NO: 212 - DNA, 405 bp, Gibberella fujikuroi
atgttacgttcatctcctccaccaagcctgcccagagacgccccaagcactgtttttaaaacttatacaccacacacgttgttaccatttaacggagaagaggaccgtcctgtttttctggccgttagaggcagagtctttgatgtgtcccctggcagaaatttttatggtccaggaggtccctactctaattttgctggtcgtgatgcatctagagggttagcctgtggtagcttcgatgaagatatgttgaccaaggatctagatggcccactagataaactagaaggtttagacgcggaacaaatggaagctttacaaggatgggaggaaagatttctggaaaaatacaatgtcgtgggtaaacttgtttctgttcaggattatgaatctcagaaggcttaa

SEQ ID NO: 213 - protein, 134 aa, Gibberella fujikuroi
MLRSSPPPSLPRDAPSTVFKTYTPHTLLPFNGEEDRPVFLAVRGRVFDVSPGRNFYGPGGPYSNFAGRDASRGLACGSFDEDMLTKDLDGPLDKLEGLDAEQMEALQGWEERFLEKYNVVGKLVSVQDYESQKA

SEQ ID NO: 214 - DNA, 516 bp, Gibberella fujikuroi
atggagcatgttgaacaacacatggctcaacaagcttcccaagaaacagcgtcattgttcacaccattaaacttaattttgctgtctgctgttttatacaccacttattccatgttacgttcatctcctccaccaagcctgcccagagacgccccaagcactgtttttaaaacttatacaccacacacgttgttaccatttaacggagaagaggaccgtcctgtttttctggccgttagaggcagagtctttgatgtgtcccctggcagaaatttttatggtccaggaggtccctactctaattttgctggtcgtgatgcatctagagggttagcctgtggtagcttcgatgaagatatgttgaccaaggatctagatggcccactagataaactagaaggtttagacgcggaacaaatggaagctttacaaggatgggaggaaagatttctggaaaaatacaatgtcgtgggtaaacttgtttctgttcaggattatgaatctcagaaggcttaa

SEQ ID NO: 215 - protein, 171 aa, Gibberella fujikuroi
MEHVEQHMAQQASQETASLFTPLNLILLSAVLYTTYSMLRSSPPPSLPRDAPSTVFKTYTPHTLLPFNGEEDRPVFLAVRGRVFDVSPGRNFYGPGGPYSNFAGRDASRGLACGSFDEDMLTKDLDGPLDKLEGLDAEQMEALQGWEERFLEKYNVVGKLVSVQDYESQKA

SEQ ID NO: 216 - DNA, 366 bp, Gibberella fujikuroi
atggctggcaagttcgaacccaaagtgcccgttaatttggacccacctaaagatgacataatctcaagggaagagttagcaaaggcaaacggtgctgatgggaataagtgttatgttgcaattaaaggcaaggtgtatgacgtaaccggcaacaaagcctacttgccaggcgcaagctataatgtgtttgctggcaaagatgcctcaagagctttgggtaaaaccagcaccaaacctgaggatgctaggcctgaatggcaagacttagatgagaaagaaaagggtgtcttaaacgactggattactttctttagcaaaagatacaatgttgtgggggttgtggaaggcgcaacaaacatggattag

SEQ ID NO: 217 - protein, 121 aa, Gibberella fujikuroi
MAGKFEPKVPVNLDPPKDDIISREELAKANGADGNKCYVAIKGKVYDVTGNKAYLPGASYNVFAGKDASRALGKTSTKPEDARPEWQDLDEKEKGVLNDWITFFSKRYNVVGVVEGATNMD

SEQ ID NO: 218 - DNA, 807 bp, Gibberella fujikuroi
atggctgacgaatcaacacttcgtcaaagaaaaccgcaaccgaagaacgaaaccgaaagtgaagtttctcgtcctagcacacctactaaaaaatcaaaaaagagatcatccgcaaaagttgacgaggaagatccatgggatggttattccccatacttagatgtggtgagagtaattagctttattattgttgcatctatgggattgagctatgtcatttcaggtggcgagtcattctggtggggtcataaaaacaagccgaattggatgacacaacgtttctacaaagatttgatattaggacccccacctccagtgtacatgactttggaggaactttctttacatgacggtactgatcctgacagaccgcttttacttgcgatcaacggtacaatttatgacgtgtcaaatggtaggagaatgtacggcccaggtggttcctattcttactttgcagctacggatgctgcaaggggattcgtcaccggctgttttgctgaagatcaaactgcagacttgagaggttatgaagaaacttttcttccactggacgatccagaagttgacagtcactggactcccgaagctctggcagaactgaagatcaaagagcgtgaagaagctaaaaaaagggctgatgctgctttacaacactgggttgatttttttgcaaattccaaaaaatacaccaaagtcggttatgtttatagagagccggggtggcttgaaaaagagaaaccaaagaaattatgcgatcaggcccaaagatcaagaaagaccagaaaaattccaaaaaaggattaa

SEQ ID NO: 219 - protein, 268 aa, Gibberella fujikuroi
MADESTLRQRKPQPKNETESEVSRPSTPTKKSKKRSSAKVDEEDPWDGYSPYLDVVRVISFIIVASMGLSYVISGGESFWWGHKNKPNWMTQRFYKDLILGPPPPVYMTLEELSLHDGTDPDRPLLLAINGTIYDVSNGRRMYGPGGSYSYFAATDAARGFVTGCFAEDQTADLRGYEETFLPLDDPEVDSHWTPEALAELKIKEREEAKKRADAALQHWVDFFANSKKYTKVGYVYREPGWLEKEKPKKLCDQAQRSRKTRKIPKKD

SEQ ID NO: 220 - DNA, 1983 bp, Artificial Sequence
  Artificial polynucleotide
atggcttcagaaaaagaaattaggagagagagattcttgaacgttttccctaaattagtagaggaattgaacgcatcgcttttggcttacggtatgcctaaggaagcatgtgactggtatgcccactcattgaactacaacactccaggcggtaagctaaatagaggtttgtccgttgtggacacgtatgctattctctccaacaagaccgttgaacaattggggcaagaagaatacgaaaaggttgccattctaggttggtgcattgagttgttgcaggcttacttcttggtcgccgatgatatgatggacaagtccattaccagaagaggccaaccatgttggtacaaggttcctgaagttggggaaattgccatcaatgacgcattcatgttagaggctgctatctacaagcttttgaaatctcacttcagaaacgaaaaatactacatagatatcaccgaattgttccatgaggtcaccttccaaaccgaattgggccaattgatggacttaatcactgcacctgaagacaaagtcgacttgagtaagttctccctaaagaagcactccttcatagttactttcaagactgcttactattctttctacttgcctgtcgcattggccatgtacgttgccggtatcacggatgaaaaggatttgaaacaagccagagatgtcttgattccattgggtgaatacttccaaattcaagatgactacttagactgcttcggtaccccagaacagatcggtaagatcggtacagatatccaagataacaaatgttcttgggtaatcaacaaggcattggaacttgcttccgcagaacaaagaaagactttagacgaaaattacggtaagaaggactcagtcgcagaagccaaatgcaaaaagattttcaatgacttgaaaattgaacagctataccacgaatatgaagagtctattgccaaggatttgaaggccaaaatttctcaggtcgatgagtctcgtggcttcaaagctgatgtcttaactgcgttcttgaacaaagtttacaagagaagcaaaggttctagtactggttcatctacatctactggaatggtcgcacaaactttcaacctggatacctacttatcccaaagacaacaacaagttgaagaggccctaagtgctgctcttgtgccagcttatcctgagagaatatacgaagctatgagatactccctcctggcaggtggcaaaagattaagacctatcttatgtttagctgcttgcgaattggcaggtggttctgttgaacaagccatgccaactgcgtgtgcacttgaaatgatccatacaatgtcactaattcatgatgacctgccagccatggataacgatgatttcagaagaggaaagccaactaatcacaaggtgttcggggaagatatagccatcttagcgggtgatgcgcttttagcttacgcttttgaacatattgcttctcaaacaagaggagtaccacctcaattggtgctacaagttattgctagaatcggacacgccgttgctgcaacaggcctcgttggaggccaagtcgtagaccttgaatctgaaggtaaagctatttccttagaaacattggagtatattcactcacataagactggagccttgctggaagcatcagttgtctcaggcggtattctcgcaggggcagatgaagagcttttggccagattgtctcattacgctagagatataggcttggcttttcaaatcgtcgatgatatcctggatgttactgctacatctgaacagttggggaaaaccgctggtaaagaccaggcagccgcaaaggcaacttatccaagtctattgggtttagaagcctctagacagaaagcggaagagttgattcaatctgctaaggaagccttaagaccttacggttcacaagcagagccactcctagcgctggcagacttcatcacacgtcgtcagcattaa

SEQ ID NO: 221 - protein, 660 aa, Artificial Sequence
  Artificial polypeptide
MASEKEIRRERFLNVFPKLVEELNASLLAYGMPKEACDWYAHSLNYNTPGGKLNRGLSVVDTYAILSNKTVEQLGQEEYEKVAILGWCIELLQAYFLVADDMMDKSITRRGQPCWYKVPEVGEIAINDAFMLEAAIYKLLKSHFRNEKYYIDITELFHEVTFQTELGQLMDLITAPEDKVDLSKFSLKKHSFIVTFKTAYYSFYLPVALAMYVAGITDEKDLKQARDVLIPLGEYFQIQDDYLDCFGTPEQIGKIGTDIQDNKCSWVINKALELASAEQRKTLDENYGKKDSVAEAKCKKIFNDLKIEQLYHEYEESIAKDLKAKISQVDESRGFKADVLTAFLNKVYKRSKGSSTGSSTSTGMVAQTFNLDTYLSQRQQQVEEALSAALVPAYPERIYEAMRYSLLAGGKRLRPILCLAACELAGGSVEQAMPTACALEMIHTMSLIHDDLPAMDNDDFRRGKPTNHKVFGEDIAILAGDALLAYAFEHIASQTRGVPPQLVLQVIARIGHAVAATGLVGGQVVDLESEGKAISLETLEYIHSHKTGALLEASVVSGGILAGADEELLARLSHYARDIGLAFQIVDDILDVTATSEQLGKTAGKDQAAAKATYPSLLGLEASRQKAEELIQSAKEALRPYGSQAEPLLALADFITRRQH

SEQ ID NO: 222 - DNA, 2016 bp, Gibberella fujikuroi
atgacagagagggagctccacgcggatgtgcgaaggttctatcaacacacttctcaaactctaaccggcctgcgaccttatcccaccgagcgagaagtccaagatgcagccgcggcgtggcagcaaaaggacaacatcgagaatgccatccgcgaagcggttcgaaagggcagcccagatagcggcggcactacggacaccgtcatacccctcagtgccgccgagaaacgcgctctgatcaacgagattgaccattcgttctctgagaacgggatgtggatggtcatcttcactgtcagtctgagtgcctttctccagggctttgtacagagtagtcagaacggtgcaaatctctttgctgatcagtggcttaagtctcagaagcatactgtcaactcccagttcgcttatgccaacgcagctgtttacttcagcgctgctgttataggatgtccactggctgcaccgatgagttcactgtttggtcgccgtggtgtcattattgtcgcctcatttctcatctttgcggcatccgttggctcggcttgcattacactcaatgacaacgcatggctgtctcttaggagcatcagactaatcggcggtgtcggcatgggcttaaaggctactagcacccccatcctcgcagcggaaacggcagttggctcgtggagaggctcttcagttctgttatggcagctatgggtctcttttggcatcatgatgtcttttattgtcaatatttgcttgaaccagattgacgacaagaatctaaagctccggttgattctggcgtctccagcagtgtttgcgcttatgctgatgtatactgtcgccaaatgccctgagtcattccgctactacttgatgccaggttcgagaaagtatagccctgagaaggcatatgcctcgttgctacgattgcgcaacaccaaggtcggtcacaacacttctacacatcccttttggcttaccccttcgttccccttcacaacctgcaccgtcgaacaacatctgatacaagcggtcacagctacaagcagtcagagacttgtacttgacgccgccccgaaacctcgaaccctagtagttggagctgtcagtcactacgtgcgacaatactggaagatcctgaaagtccatcgccttcggaatgcagctattacaacagggattgtggctttgtcgcagcaactttctggaattaacctcatggcgttctacggtgggacaacacttgtaggtattagtccaggcaatcagccaacagaagatcaaatctccaaggccatgctgtacaacttgatctttggtctgtcgaacttcttattctgcttacccgccatccattccatagacgttctgggaagaaggagggttctactcttcacaatcccaggtatggccttaaccttgatggcagcggctataagcttcaatacggcaaatgaggatgtgagaaacggacttgtagccttctggatctactttcacacagtattttatagcccgggaatggggccagtgccgttcgtgttagcttcggaaagctttcctttggcctttcgtgacaccggcgcatcgcttgcaatatccatcaaccttctattcgctggcctcctggcatggctgcaacccctactggtcactggtattagattcgggggaacacttggggtgtttgctggcttgaacgtcgttgcctttgctctcatctttctcctgatggaggaaaccagcggcgtacctcttgagtctctaggatctgtcttcgaccagtcgaagaaggatctgatccacttccaactcttcaagtttttaccatggttcggtcggttcattcttggtaggagtagtcttgccgaaagaccagaacgtactgtcgacttgagtccgagctcggtgacagctgcttcggtcactgatgatgacgatgaggaacgcatttggaatagcgatactgtttcaagtggggtgaggctcgccgatatgttggggggaaacggaagaggctga

SEQ ID NO: 223 - DNA, 459 bp, Saccharomyces cerevisiae
atgtccttcattaaaaacttgttatttggaggtgttaaaacaagtgaggatccaaccgggctcacaggtaacggggcctcaaacacaaacgattctaataaaggtagtgaaccggtagtagcgggtaatttctttcctaggacgctttccaaatttaacggccacgacgatgaaaaaatatttattgctattaggggcaaagtatacgactgcacaagagggaggcagttttacggtccaagcgggccatacactaactttgcaggccatgatgcgtcgcgtggtcttgcattgaactccttcgatctggacgttattaaagattgggatcagcctatcgatcccttagatgatctgacaaaagaacagattgacgcactggatgagtggcaagagcattttgagaataagtacccatgcattggtactctgattccggagcctggcgtgaacgtatga

SEQ ID NO: 224 - protein, 152 aa, Saccharomyces cerevisiae
MSFIKNLLFGGVKTSEDPTGLTGNGASNTNDSNKGSEPVVAGNFFPRTLSKFNGHDDEKIFIAIRGKVYDCTRGRQFYGPSGPYTNFAGHDASRGLALNSFDLDVIKDWDQPIDPLDDLTKEQIDALDEWQEHFENKYPCIGTLIPEPGVNV

SEQ ID NO: 225 - DNA, 1863 bp, Gibberella fujikuroi
atgtcaagtccattagacgcggctggtctagctattgctacaacagagttgtgcagaaacttggcgactgggctgtacttcattatcagagagatcagagatgcttctaaagatgcagaaattatgcaagatacattagcagcgttacataccagattggaccaagttagagctttatttgacgccaacgttccacagagtccattggaaaaagattatagaaactccatagacagaacattagagaatattcacagagatctgtctttattaactagtaaattgcatattgacgtcatcttagaagcgaaaggttcaaaaagattagaggcctggtacgtcttacagcgtaaatttcaatcagatgatatcaggaatatcaaacagagacttgcagggtccgaggaactgcttcagtctcatttcgaaatgttgtcaatatatatctcttacaggaccagagacgaggtaacagactttaaagctttcgtcagaccgattttagagaagctgttgtttcatgcaacgttgacagaggaaagacaaagataccaagcagctgagtcaagatctattaaaagattacaacacgtcactaatgccctaggcactggtaatacattccctggagaagaatcagatttcgaatatcatgacgcatttaagacttggaaagacaagtctgaagctatgattatgtctatcgcagatccaccttggcatcaagtgtcaaattctaactacgtcccatcaattcgtaatgaatctcgtgatggcgcatcaatattgccaactgtacgtgattttagagaaaaaaacggcatgtatcccagcttgcgtgttacacccaacttaagccacgttgaagagatcttagatgaatcattacatcaggatgttacagaagatttgattaattggtgtaaagagcagggattcccagtcaacgtctcaaactttaggtacgatttaatttgggaggcggcacctgtggcccttaaaggaacgtcacctatgcatcaagccataaaaactaataatatggttgttttggaaaaaatgttgtccagagattgtaacatagaagtcaggctggaggacggttctcaagatccaaccccactactattagctggctctgaactaaatgcagttgctgttaagctgttattaaccaaaggtgccaaagcagatgctacagatagaactggaaaaacaggtctacatttgtgccaatcccctaaattcgagggtagaagagtggctaaactattgttgggtgactctagagctgaggcgttagatgttaatgcacaagatcagtttggcatgactgcagctcacatcgccgctagagtaggcgatgttaaaatgttagagtacctactattggaccagtacggaaagaaggtagctgatgccaacgcccaacagcaagatggttcaaccccgttgatggtcgcattgaaaagcaacatcgcaaataaaaaacaagtgattgatgtcttgtctaggtgctccgatttgtcaattaaaaacaagaacggtgaagacgcgaaagaggtagccgcaaagcatagtccgaaagatgtaagaaagtatcttttagctcatctagaccaagattcaactaggtctcgtaggatctctgaatccacaacagttgtgtccggaatttctgtgcagatgagagaggaatcttgttcagggtgccgtaggcattgtccacaatttactgactgtaaattgtcaataggtgactctgcattttcccaggattggaagagatccttgcgtaagtactcctctgatcaatcaagtatagcgatggggtctagcagttccattcgtcaggccagataa

SEQ ID NO: 226 - DNA, 2841 bp, Phaeosphaeria sp. L487
atgtttgccaagttcgacatgctagaagaagaggctagagcacttgttagaaaagtaggcaatgctgttgatcccatttacggattcagtacaacctcctgccaaatttacgatacggcatgggctgctatgattagtaaggaagaacatggagataaggtttggttgtttccagaatctttcaaatacttactagaaaagcaaggtgaggatggtagttgggaaaggcatccaaggagtaaaacagtaggggtgctaaatacagctgcagcgtgcttagctttattgcgtcacgttaagaatccacttcagcttcaagatatagcagctcaggatatagaacttagaattcaaagaggtctaaggagtctagaagaacagcttattgcgtgggacgatgtccttgacacaaatcacattggtgtcgagatgattgtcccggctctacttgattaccttcaagctgaagatgaaaatgtagattttgaattcgagtcacactctttgcttatgcagatgtataaggagaagatggcccgtttctcaccagaatccttatatcgtgcaaggcccagttctgctctgcataatttagaagcgctaattggtaagcttgattttgataaggtgggtcaccatctgtacaatggtagtatgatggcctcaccttcatctactgcggctttcctaatgcatgcctcaccttggtcacacgaggcagaagcatatctaagacatgtttttgaagctggcactgggaagggctccggcggatttcccggtacatatcctactacatactttgaattaaattgggttctatcaaccttgatgaaatcagggtttactttgtcagatcttgagtgcgatgaattatcaagcatagcaaacactatagcagagggtttcgaatgcgaccatggagtgatcgggtttgccccaagagctgttgatgttgatgatactgcaaaaggactacttacccttacgttattgggcatggacgaaggggtgagcccagcacccatgattgcgatgtttgaagctaaagatcatttcctaacgttcctgggtgaaagagatccttcattcaccagtaattgtcacgttctattatctttactacaccgtaccgacttactgcaatatctgccacagattagaaaaactacaacttttctatgcgaagcctggtgggcttgtgatggtcaaataaaagataaatggcatcttagtcatctatatccgactatgttgatggtccaggcatttgctgagatccttctgaagtccgcagaaggtgaaccattgcacgatgctttcgacgcagccactttgtctagagtctcaatttgtgtttttcaagcttgtcttcgtactttgttggcacaatcacaagatggtagctggcacggtcaaccggaggcgtcttgctatgcagtattaacactagctgagagcgggagacttgttcttttgcaagcgcttcaaccacagattgcagccgccatggagaaggctgcggatgttatgcaagcgggaagatggtcctgtagcgatcacgattgtgattggacttccaaaacagcctaccgtgtagatttggtggctgcagcttacaggctggcagccatgaaggcttcctctaacttgacctttactgttgatgacaatgtgtcaaagaggtccaacggttttcaacagttggtgggaagaacagatctattctctggagtgccagcatgggaactgcaagcatcattcttagaaagtgcgctttttgttcccctattaaggaaccatagactagatgtgtttgatagggacgacataaaagtttcaaaggatcattatttagatatgattccatttacgtgggtaggttgtaataacaggtctagaacatacgtgagtacgtccttcttattcgatatgatgatcatctctatgttaggttatcaaatagacgagttcttcgaggccgaagctgcacctgctttcgcacaatgtataggccaattacaccaagtcgttgacaaagtcgttgatgaagtcatcgacgaagttgtcgacaaggtggtcggcaaggttgtgggcaaggttgtaggtaaggtggtggacgagcgtgtcgactctccgacccatgaagcaatagcgatatgcaatattgaagcctctttgaggagatttgtggatcatgttctacatcaccaacatgtattacacgcaagccaacaagagcaagacattttatggcgtgaattgagagcttttttacacgctcacgttgtgcaaatggctgacaattctactctggcgcctcctggcaggacattcttcgactgggttaggacaactgctgctgatcatgtagcctgcgcttactctttcgcattcgcctgctgtattacttccgcaacgatcggacagggccaatctatgttcgctactgttaatgagctgtatcttgttcaagcagcagctagacatatgactaccatgtgcagaatgtgcaatgatattggtagtgttgatagggatttcattgaagccaatataaattctgttcatttccctgaattttctactctaagccttgtggcagataagaaaaaagcccttgcccgtttagcagcttatgaaaaatcttgtttgacccataccttagatcaatttgaaaatgaagttctacaatccccaagagtttcatccgcagcctccggcgattttaggacaaggaaagtggcagtggtaaggttcttcgcggatgtgaccgatttttatgaccagttatatattctgagagatctttcatcttctttaaagcatgtcggcacctaa

SEQ ID NO: 227 - protein, 946 aa, Phaeosphaeria sp. L487
MFAKFDMLEEEARALVRKVGNAVDPIYGFSTTSCQIYDTAWAAMISKEEHGDKVWLFPESFKYLLEKQGEDGSWERHPRSKTVGVLNTAAACLALLRHVKNPLQLQDIAAQDIELRIQRGLRSLEEQLIAWDDVLDTNHIGVEMIVPALLDYLQAEDENVDFEFESHSLLMQMYKEKMARFSPESLYRARPSSALHNLEALIGKLDFDKVGHHLYNGSMMASPSSTAAFLMHASPWSHEAEAYLRHVFEAGTGKGSGGFPGTYPTTYFELNWVLSTLMKSGFTLSDLECDELSSIANTIAEGFECDHGVIGFAPRAVDVDDTAKGLLTLTLLGMDEGVSPAPMIAMFEAKDHFLTFLGERDPSFTSNCHVLLSLLHRTDLLQYLPQIRKTTTFLCEAWWACDGQIKDKWHLSHLYPTMLMVQAFAEILLKSAEGEPLHDAFDAATLSRVSICVFQACLRTLLAQSQDGSWHGQPEASCYAVLTLAESGRLVLLQALQPQIAAAMEKAADVMQAGRWSCSDHDCDWTSKTAYRVDLVAAAYRLAAMKASSNLTFTVDDNVSKRSNGFQQLVGRTDLFSGVPAWELQASFLESALFVPLLRNHRLDVFDRDDIKVSKDHYLDMIPFTWVGCNNRSRTYVSTSFLFDMMIISMLGYQIDEFFEAEAAPAFAQCIGQLHQVVDKVVDEVIDEVVDKVVGKVVGKVVGKVVDERVDSPTHEAIAICNIEASLRRFVDHVLHHQHVLHASQQEQDILWRELRAFLHAHVVQMADNSTLAPPGRTFFDWVRTTAADHVACAYSFAFACCITSATIGQGQSMFATVNELYLVQAAARHMTTMCRMCNDIGSVDRDFIEANINSVHFPEFSTLSLVADKKKALARLAAYEKSCLTHTLDQFENEVLQSPRVSSAASGDFRTRKVAVVRFFADVTDFYDQLYILRDLSSSLKHVGT

SEQ ID NO: 228 - DNA, 2859 bp, Fusarium fujikuroi
atgcctggtaagatagaaaatggcaccccgaaagatttaaaaactggtaatgattttgtgtctgccgcaaaatcattgcttgacagggcttttaaaagccatcacagttattacggtttatgctccaccagctgtcaggtttacgatactgcgtgggtggcgatgattccaaaaacaagagacaatgtgaagcaatggctatttccggagtgtttccattacttgctgaaaacccaagctgctgatggcagctggggttctttgccaactacacaaactgcaggtattctggatactgcatctgctgtacttgccctgttatgccacgctcaggaaccattacaaatcttagatgtttcaccagacgagatgggtttgcgtattgaacatggggtgacttctcttaagagacaattggctgtttggaacgatgtcgaggacacaaatcacataggtgtagaattcattatcccagctttacttagcatgttggaaaaggaattggatgttccctcattcgaatttccttgtcgttcaattctggaaagaatgcacggggaaaaacttgggcacttcgatcttgaacaagtctacggtaaaccgtcatccttgttacactctctagaggcttttttaggtaaattggacttcgataggttgtctcatcacctataccacggttccatgatggctagcccgtcatctacggctgcttacttgattggtgccacaaaatgggatgatgaggcagaagattatcttcgtcatgttatgaggaacggcgccggtcacggcaacggtggtatatctggtacattcccgactacacacttcgagtgctcatggataatagcaactttactaaaagtaggttttacattaaaacagattgatggtgatggcttgagggggctatctactatcttacttgaagcattgagggatgagaatggggtgataggattcgctccaagaacagcagatgtagatgatacagctaaagcgttgttggctttgagcttggttaatcaaccagtttcccctgacatcatgatcaaggttttcgaggggaaagatcactttaccacttttggcagcgaaagggatccttctttaacatccaacttacatgttcttttatctttgttgaagcagtcaaatttgagtcagtaccatccccagatcttaaagaccacactatttacatgtagatggtggtggggttccgatcactgcgtaaaagataagtggaacctttctcatctatatcctacaatgttattagtcgaggcattcacggaagttcttcacttaattgacggcggtgaactatccagcctatttgatgaatcctttaagtgcaaaataggtttatcaatctttcaagcagtattgcgtatcatactaacacaagataatgatggtagctggcgtggatatagagaacaaacatgttacgctatcttggctttagttcaggctagacacgtctgtttcttcactcatatggtagacagattgcagagttgcgtggacagaggtttttcctggcttaaatcctgttcatttcattctcaagatttaacgtggacttctaagacagcatatgaagttgggttcgtagctgaggcatataaattagctgcattgcagtcagcgtctcttgaagtgccggcagccaccatcggacatagtgttacgagtgcagtaccttcatctgatcttgaaaaatatatgaggttagttagaaaaactgccttgttttccccgttggatgagtggggtcttatggcttccattatagaatctagtttttttgtgccacttttacaagcccagagagttgagatttacccaagagacaacattaaggttgatgaggacaagtacttgagcattatcccattcacctgggtcggatgtaacaaccgttctagaactttcgcctctaacagatggttatatgatatgatgtatttgtcattgttgggttaccaaactgatgagtacatggaagcagttgccgggcccgtgttcggagacgtgtctttattgcaccaaactatagacaaggtgatagataatactatgggtaatttggctagagcaaacggtacggttcatagtggtaatggtcaccagcacgaatctccgaatataggtcaggtcgaagacactctgacaagatttactaattccgttctaaatcataaagacgtattaaacagttccagttcagatcaggatactttaagaagagaattccgtacattcatgcatgcacatattactcaaattgaggacaattctaggttttctaagcaagcttcctcagatgcattctcatctccagaacagtcttatttccagtgggttaattccacaggaggctctcatgttgcctgcgcctatagcttcgctttttcaaactgtctgatgagtgcgaatttactacagggcaaggatgcatttccttctggtactcagaaataccttatctcatcagttatgagacatgcgactaatatgtgcagaatgtacaatgattttgggagtatagccagagataatgctgaaagaaatgttaatagtatccattttcctgagtttacactgtgcaatggaacaagccagaacctagacgaaagaaaagaaagattattgaaaatcgcaacttacgagcagggctacctagatagggcattagaagcgttggaaagacagtcaagagatgacgcaggtgacagggcaggatccaaggatatgagaaaactaaagattgtaaaacttttttgcgacgttacagacctgtacgaccaattatacgttattaaagatttgtcttcttctatgaaatga

SEQ ID NO: 229 - protein, 952 aa, Fusarium fujikuroi; identical to SEQ ID NO: 102

SEQ ID NO: 230 - DNA, 1578 bp, Fusarium fujikuroi
atgagtaagtctaatagtatgaattctacatcacacgaaaccctttttcaacaattggtcttgggtttggaccgtatgccattgatggatgttcactggttgatctacgttgctttcggcgcatggttatgttcttatgtgatacatgttttatcatcttcctctacagtaaaagtgccagttgttggatacaggtctgtattcgaacctacatggttgcttagacttagattcgtctgggaaggtggctctatcataggtcaagggtacaataagtttaaagactctattttccaagttaggaaattgggaactgatattgtcattataccacctaactatattgatgaagtgagaaaattgtcacaggacaagactagatcagttgaacctttcattaatgattttgcaggtcaatacacaagaggcatggttttcttgcaatctgacttacaaaaccgtgttatacaacaaagactaactccaaaattggtttccttgaccaaggtcatgaaggaagagttggattatgctttaacaaaagagatgcctgatatgaaaaatgacgaatgggtagaagtagatatcagtagtataatggtgagattgatttccaggatctccgccagagtctttctagggcctgaacactgtcgtaaccaggaatggttgactactacagcagaatattcagaatcacttttcattacagggtttatcttaagagttgtacctcatatcttaagaccattcatcgcccctctattaccttcatacaggactctacttagaaacgtttcaagtggtagaagagtcatcggtgacatcataagatctcagcaaggggatggtaacgaagatatactttcctggatgagagatgctgccacaggagaggaaaagcaaatcgataacattgctcagagaatgttaattctttctttagcatcaatccacactactgcgatgaccatgacacatgccatgtacgatctatgtgcttgccctgagtacattgaaccattaagagatgaagttaaatctgttgttggggcttctggctgggacaagacagcgttaaacagatttcataagttggactccttcctaaaagagtcacaaagattcaacccagtattcttattgacattcaatagaatctaccatcaatctatgaccttatcagatggcactaacattccatctggaacacgtattgctgttccatcacacgcaatgttgcaagattctgcacatgtcccaggtccaaccccacctactgaatttgatggattcagatatagtaagatacgttctgatagtaactacgcacaaaagtacctattctccatgaccgattcttcaaacatggctttcggatacggcaagtatgcttgtccaggtagattttacgcgtctaatgagatgaaactaacattagccattttgttgctacaatttgagttcaaactaccagatggtaaaggtcgtcctagaaatatcactatcgattctgatatgattccagacccaagagctagactttgcgtcagaaaaagatcacttagagatgaatga

SEQ ID NO: 231 - protein, 525 aa, Fusarium fujikuroi
MSKSNSMNSTSHETLFQQLVLGLDRMPLMDVHWLIYVAFGAWLCSYVIHVLSSSSTVKVPVVGYRSVFEPTWLLRLRFVWEGGSIIGQGYNKFKDSIFQVRKLGTDIVIIPPNYIDEVRKLSQDKTRSVEPFINDFAGQYTRGMVFLQSDLQNRVIQQRLTPKLVSLTKVMKEELDYALTKEMPDMKNDEWVEVDISSIMVRLISRISARVFLGPEHCRNQEWLTTTAEYSESLFITGFILRVVPHILRPFIAPLLPSYRTLLRNVSSGRRVIGDIIRSQQGDGNEDILSWMRDAATGEEKQIDNIAQRMLILSLASIHTTAMTMTHAMYDLCACPEYIEPLRDEVKSVVGASGWDKTALNRFHKLDSFLKESQRFNPVFLLTFNRIYHQSMTLSDGTNIPSGTRIAVPSHAMLQDSAHVPGPTPPTEFDGFRYSKIRSDSNYAQKYLFSMTDSSNMAFGYGKYACPGRFYASNEMKLTLAILLLQFEFKLPDGKGRPRNITIDSDMIPDPRARLCVRKRSLRDE

SEQ ID NO: 232 - DNA, 1575 bp, Fusarium fujikuroi
atgtctattttcaacatgattacttcatatgctgggagtcaactcttaccattttacatagcaatattcgttttcacattggttccatgggctattagattctcatggttggaacttagaaaggggtcagtagtgccactggccaacccacctgactcattattcggcacaggcaagacacgtagatctttcgttaaactttccagagaaatactagccaaggcaagatctctatttccaaacgaaccatttagattgatcacagactggggagaggttcttattcttcctcctgattttgccgatgaaattagaaacgatcctagattatctttctctaaagctgcaatgcaggataatcatgccggcatcccaggtttcgaaacagtcgcattagttggtagagaagatcaacttattcaaaaagttgctagaaaacaactcacaaagcacctgtctgcagtcatagagcctttatctagagagtcaaccctagccgtttcattgaattttggtgaaactactgaatggagagctataagactaaagccagccattttggatatcattgctagaatcagctccagaatctacctaggggatcagttgtgcagaaatgaggcatggttgaagattacaaagacatatacaaccaacttctacactgcttctacaaacttgcgtatgttcccaagatcaatcagaccattagcgcactggttcttgcctgaatgcagaaagttgagacaagagagaaaagatgctataggtatcattacaccattgatcgaaagacgtagagagttacgtagagcagcaatcgctgccggtcaacctctcccagtgtttcatgatgcaatcgactggtctgaacaggaagctgaggcagccggaactggtgccagtttcgaccctgttatctttcaactaaccttgtccttgctggcaattcataccacttacgatctgttacaacaaactatgattgatttaggtagacacccagagtacattgaaccactaagacaagaggtagtacagctgttgagagaagagggatggaaaaagaccacattattcaagatgaagttattagactccgcgattaaggaaagtcagagaatgaaacctggttctatagtcacaatgcgtagatacgttactgaggatatcaccctttcatcaggtcttacattgaaaaagggaacaagattgaacgtggacaatagaagattggatgatcctaagatttacgataacccagaagtctacaatccatacagattttacgatatgagatccgaagcgggtaaggaccatggtgctcaattagtatctacaggttcaaaccacatgggttttggtcatggacaacattcttgtccaggcagattcttcgctgcaaacgaaatcaaggttgcactatgtcatatcttagtgaaatacgactggaagctctgtccagatactgaaactaagccagacacaagaggcatgattgctaagagttctccagttactgatatccttatcaaaagacgtgaaagcgtcgaacttgatttggaagcaatttag

SEQ ID NO: 233 - protein, 524 aa, Fusarium fujikuroi; identical to SEQ ID NO: 80

SEQ ID NO: 234 - DNA, 1575 bp, Fusarium fujikuroi
atgagcatcttcaatatgatcaccagctatgcgggtagccaacttttgcccttctacatcgccatattcgtctttactttagtcccatgggcaatccgcttctcttggctagaattgcgcaagggctcagtggtgccacttgcgaacccgcccgactcactgttcggcaccggtaaaaccaggaggagttttgtcaagcttagtagagaaattctcgctaaagcgaggagcttgttccctaatgagccatttcgcttgattacggactggggtgaggttctcattctccccccagactttgcagatgagattagaaatgatccgagactgagcttctccaaggcggcgatgcaggataatcatgctggaatacctggctttgagactgttgccctggtgggtcgtgaagaccaacttattcagaaggtggcccgaaagcagttgaccaagcatctttccgctgtcatagagccactatctagagagtccaccctcgcagtgtcgctcaactttggagagacaacagaatggcgagcgatacgcctcaagcccgcaattctagacatcatcgcccgcatctcgtccagaatctatctcggcgaccaactatgccgcaacgaagcttggctgaagatcacaaagacatacaccaccaacttctacactgcatctaccaacctccgaatgtttcctcgatcgatccgtcctctcgcccactggttcctccccgaatgcagaaagcttcgacaggagcgcaaggatgcaatcggtattattacgccactgattgagcgccgccgtgagcttcgaagagctgcgatcgcagctggtcagcctctgcctgtgttccacgacgctattgactggtcggaacaggaggcagaagctgcaggcacaggggcctcgtttgaccccgtgatcttccagcttacgctctctcttctggcaattcatacgacgtatgatctcctccagcaaacgatgattgaccttggtcgccacccagagtatatcgagcctcttagacaggaagttgttcaacttcttcgtgaagaaggttggaagaaaacaacgcttttcaagatgaagctccttgacagtgctatcaaagagtctcagcgaatgaagcctggaagcatagttaccatgcgtcgctacgtaaccgaagacatcaccctctctagcggcctgaccctcaaaaaagggacccgcctcaacgttgacaacagacgcctcgacgatcccaaaatctacgataaccccgaggtttacaatccttatcgcttctacgacatgcgctccgaagccgggaaagaccatggggcacagctagtatcaactggctcaaaccatatgggcttcggccacggtcagcactcatgcccagggcgtttcttcgctgcgaatgagatcaaagtagcgctatgccacatcttggtcaagtatgattggaagctgtgccctgacacggagaccaagcctgataccaggggcatgattgccaagtccagccctgtcacggacatcttgatcaagcgtcgggagtcagttgagttggatttggaagcaatttga

SEQ ID NO: 235 - protein, 524 aa, Fusarium fujikuroi; identical to SEQ ID NO: 80

SEQ ID NO: 236 - DNA, 1587 bp, Phaeosphaeria sp. L487
atgaaacacattgatgtgatgaacttcatatcgaaaatatgctcctggtctaaggacagcccaggattcgtccttctgatttcaattctggtgatactcggcagtgtcaccttcattcccaagtgtggcagaagaagcgcctttgatgctttgcccattgtgaacaaaccaaagtttggtcccattttctcaatcattgctcgatggagatttattcaccaaagcaagaagatattggaagagggacagaagtgctacagcaaccgcccctttcgcatatggacagactggggcgaagtactcatgttgacaccggattatgcgcacgaaatacgcaatgacccgcatctcagcttttctggagctgtgaaaatcgacggccacgcggatataccgggcttcgagactgtgaaactgatttcgcatccagacaacctgattcagctagtagcaaggaagcaattaaccagacaccttgcggctgtgattcagcctctttctagtgttacagaggaagccctcatcaagaatttagggaaatcacaagaatggtctgagatttatctaaaatatgctgttctagatatcattgcccgactatcctcgcgcatttacttcggagaactactgtaccagaacgaagaatggctttccattgtaaaaaattatgccactcacttcttcactgccagctccgatctacgcaaagttccttgggcctttcgctcactagtccattggttcgtgccgtcctgccgagcgctaaggcttgagcgctacaatgcgcgtcgtgtcttagaaccggttatcagccagcgtcgtcaactgaaggaagctgccaaaacggctggaggtacaccgttacacttcgaggatgccattgaatgggccgaagtagaagctcgagtgaaaggaacaaaatatgatccagtaattttccaattgacgctctcgcttctggcaatacacacaacatacgatctcctcgagatgtgtatgattgatctcgcaaagcgccccgactgtatcgaggaccttcgtaaagaagtcattacagtactccgcaaggatggctggacgaagaatgctctgtacaacatgaagctgctcgactctgcaataaaagagtctcaacgcctcaaaccaggaagtatcacatcaatgcgtcgctacgctacttcagacgtacaactgcgcgacggcgtagttctcaaaaagggcaataggctgaatgttcttaccttgcaccgatccccagacctattcccttcaccggatacctacgacccatatcggttctacaacatacgcggacagcctgggaaagagaactgggcgcaactagtatcgacatctgttgaacatatgggctttggtcatggggaacactcgtgccctggacgattctttgcggcaaacgaaattaaggtagcacttgcgcatatcctcgtcaagtacgactggaagctgtcagacgaggcgggcggttgtactgaggtcaagggcatggtcgaaaaggcaggaagtaaggtcaagatactggtgagacaaaggcaagacgtggagagcgtccttgatgaggcgtga

SEQ ID NO: 237 - protein, 528 aa, Phaeosphaeria sp. L487; identical to SEQ ID NO: 94

SEQ ID NO: 238 - DNA, 255 bp, Fusarium fujikuroi
atgagcgaaacatacacgacagcagaagttggaaagcataaggacgaggcgaatggcttctggttgatagttgagaatgacgtttacgacgtcacgaagtttattgacgagcaccctggcggtgccaagattctaaaaaggtggtctggaaaaaacgcaactaaggcattctggaagtatcataatgaacacgtacttgctaaatacggtaaggaccttaaaataggcgccgttggcgagagcgcgaaactatga

SEQ ID NO: 239 - protein, 84 aa, Fusarium fujikuroi
MSETYTTAEVGKHKDEANGFWLIVENDVYDVTKFIDEHPGGAKILKRWSGKNATKAFWKYHNEHVLAKYGKDLKIGAVGESAKL

SEQ ID NO: 240 - DNA, 999 bp, Fusarium fujikuroi
atgtttgctaggagtgctttcagagcagcacaaccccttagaagcgttaggaggtatgccacagaagcgggtggagcgggtggtagcaacgctttcctgtacgctgcgggcgcagccgcctttggaggagcaggctattggtatttcagcaagggtggtgctccgagcgctgcggctgcggcggccgatgtgaaacaggccgttggtatcgaaccgaaaaaagcattcacgggaggcgatcaaggtttcgttagcttgaaactttccgatgtggagttggtaaaccacaatacaaaacgtcttagattcgagctacccgagcccgaccaagttagtggattgcatgtggcttcagcgattttgacgaagtacaaagggccgaatgacgagaaggcaacactaaggccatatacgcccatttctgacgaatccgaaaaaggttttatagacctacttgtaaagaagtaccccgatggccccatgagtacgcacttacacaatctggtaccaggccaacgtctagatataaagggtccgcttcccaagtacccgtgggaggagaataagcacgaacatattgcgctaatagcgggtggtaccgggattacaccaatgtatcagttggcgagggcgatatttaacaatccaaacgacaagacaaaggtgacactggtgtttggtaatgtttccgaacaggacattctgctaaaaaaggagttcgagcacctagaaaacacgttccctcagaggttccgtgcattctacgttcttgataatccgcctaaggaatgggttggtaactctggttatataagcaaagagctactgaaaacagttttgcctgagcctaagaacgagaatattaaactgttcgtgtgcggccccccgggcttaatgaacgctatctcaggaaacaaggtatcaccaaaaaaccaaggagaactaaccggcgcactaaaggagctagggtataaggaggatcaggtctataaattttaa

SEQ ID NO: 241 - protein, 332 aa, Fusarium fujikuroi
MFARSAFRAAQPLRSVRRYATEAGGAGGSNAFLYAAGAAAFGGAGYWYFSKGGAPSAAAAAADVKQAVGIEPKKAFTGGDQGFVSLKLSDVELVNHNTKRLRFELPEPDQVSGLHVASAILTKYKGPNDEKATLRPYTPISDESEKGFIDLLVKKYPDGPMSTHLHNLVPGQRLDIKGPLPKYPWEENKHEHIALIAGGTGITPMYQLARAIFNNPNDKTKVTLVFGNVSEQDILLKKEFEHLENTFPQRFRAFYVLDNPPKEWVGNSGYISKELLKTVLPEPKNENIKLFVCGPPGLMNAISGNKVSPKNQGELTGALKELGYKEDQVYKF
